United States Patent Application Publication US 2022/0333131 A1 - sequence listing, part 2

SEQ ID NO: 2146 - protein, 737 aa, Artificial Sequence
  Description of Artificial Sequence: Synthetic polypeptide
MAADGYLPDWLEDNLSEGIREWWDLKPGAPKPKANQQKQDDGRGLVLPGYKYLGPFNGLDKGEPVNAADAAALEHDKAYDQQLKAGDNPYLRYNHADAEFQERLQEDTSFGGNLGRAVFQAKKRVLEPLGLVEEGAKTAPGKKRPVEPSPQRSPDSSTGIGKKGQQPAKKRLNFGQTGDSESVPDPQPLGEPPAGPSGLGSGTMAAGGGAPMADNNEGADGVGNASGNWHCDSTWLGDRVITTSTRTWALPTYNNHLYKQISSASSGSTNDNHYFGYSTPWGYFDFNRFHCHFSPRDWQRLINNNWGFRPKRLNFKLFNIQVKEVTTNDGVTTIANNLTSTVQVFSDSEYQLPYVLGSAHQGCLPPFPADVFMIPQYGYLTLNNGSQAVGRSSFYCLEYFPSQMLRTGNNFTFSYTFEDVPFHSSYAHSQSLDRLMNPLIDQYLYYLARTQSTGGTAGTRELLFSQGGPSNMSAQAKNWLPGPCYRQQRVSKTLTQNNNSNFAWTGATKYHLNGRDSLVNPGVAMATHKDDEDRFFPSSGVLIFGKQGAGANNTALDNVMITNEEEIKTTNPVATEQYGVVASNLQSSNTAPATGTVNSQGALPGMVWQNRDVYLQGPIWAKIPHTDGNFHPSPLMGGFGLKHPPPQILIKNTPVPANPPTVFSPAKFASFITQYSTGQVSVEIEWELQKENSKRWNPEIQYTSNYAKSTNVDFAVNSEGVYTEPRPIGTRYLTRNL

SEQ ID NO: 2147 - protein, 737 aa, Artificial Sequence
  Description of Artificial Sequence: Synthetic polypeptide
  MOD_RES (264)..(264): Xaa can be any naturally occurring amino acid
  MOD_RES (448)..(448): Xaa can be any naturally occurring amino acid
  MOD_RES (459)..(459): Xaa can be any naturally occurring amino acid
  MOD_RES (470)..(470): Xaa can be any naturally occurring amino acid
  MOD_RES (495)..(495): Xaa can be any naturally occurring amino acid
  MOD_RES (533)..(533): Xaa can be any naturally occurring amino acid
  MOD_RES (547)..(547): Xaa can be any naturally occurring amino acid
  MOD_RES (555)..(555): Xaa can be any naturally occurring amino acid
  MOD_RES (557)..(557): Xaa can be any naturally occurring amino acid
  MOD_RES (561)..(561): Xaa can be any naturally occurring amino acid
  MOD_RES (563)..(563): Xaa can be any naturally occurring amino acid
  MOD_RES (593)..(593): Xaa can be any naturally occurring amino acid
  MOD_RES (596)..(596): Xaa can be any naturally occurring amino acid
  MOD_RES (661)..(662): Xaa can be any naturally occurring amino acid
  MOD_RES (664)..(664): Xaa can be any naturally occurring amino acid
  MOD_RES (718)..(718): Xaa can be any naturally occurring amino acid
  MOD_RES (723)..(723): Xaa can be any naturally occurring amino acid
MAADGYLPDWLEDNLSEGIREWWDLKPGAPKPKANQQKQDDGRGLVLPGYKYLGPFNGLDKGEPVNAADAAALEHDKAYDQQLKAGDNPYLRYNHADAEFQERLQEDTSFGGNLGRAVFQAKKRVLEPLGLVEEGAKTAPGKKRPVEPSPQRSPDSSTGIGKKGQQPAKKRLNFGQTGDSESVPDPQPLGEPPAGPSGLGSGTMAAGGGAPMADNNEGADGVGNASGNWHCDSTWLGDRVITTSTRTWALPTYNNHLYKQISSXSSGSTNDNHYFGYSTPWGYFDFNRFHCHFSPRDWQRLINNNWGFRPKRLNFKLFNIQVKEVTTNDGVTTIANNLTSTVQVFSDSEYQLPYVLGSAHQGCLPPFPADVFMIPQYGYLTLNNGSQAVGRSSFYCLEYFPSQMLRTGNNFTFSYTFEDVPFHSSYAHSQSLDRLMNPLIDQYLYYLXRTQSTGGTAGXRELLFSQGGPXNMSAQAKNWLPGPCYRQQRVSKTLXQNNNSNFAWTGATKYHLNGRDSLVNPGVAMATHKDDEXRFFPSSGVLIFGKXGAGANNTXLXNVMXTXEEEIKTTNPVATEQYGVVASNLQSSNTAPXTGXVNSQGALPGMVWQNRDVYLQGPIWAKIPHTDGNFHPSPLMGGFGLKHPPPQILIKNTPVPANPPXXFXPAKFASFITQYSTGQVSVEIEWELQKENSKRWNPEIQYTSNYAKSTNVDFAVNXEGVYXEPRPIGTRYLTRNL

SEQ ID NO: 2148 - protein, 737 aa, Artificial Sequence
  Description of Artificial Sequence: Synthetic polypeptide
  MOD_RES (264)..(264): Xaa can be any naturally occurring amino acid
  MOD_RES (448)..(448): Xaa can be any naturally occurring amino acid
  MOD_RES (470)..(470): Xaa can be any naturally occurring amino acid
  MOD_RES (533)..(533): Xaa can be any naturally occurring amino acid
  MOD_RES (547)..(547): Xaa can be any naturally occurring amino acid
  MOD_RES (555)..(555): Xaa can be any naturally occurring amino acid
  MOD_RES (557)..(557): Xaa can be any naturally occurring amino acid
  MOD_RES (561)..(561): Xaa can be any naturally occurring amino acid
  MOD_RES (563)..(563): Xaa can be any naturally occurring amino acid
  MOD_RES (593)..(593): Xaa can be any naturally occurring amino acid
  MOD_RES (596)..(596): Xaa can be any naturally occurring amino acid
  MOD_RES (662)..(662): Xaa can be any naturally occurring amino acid
  MOD_RES (664)..(664): Xaa can be any naturally occurring amino acid
  MOD_RES (718)..(718): Xaa can be any naturally occurring amino acid
MAADGYLPDWLEDNLSEGIREWWDLKPGAPKPKANQQKQDDGRGLVLPGYKYLGPFNGLDKGEPVNAADAAALEHDKAYDQQLKAGDNPYLRYNHADAEFQERLQEDTSFGGNLGRAVFQAKKRVLEPLGLVEEGAKTAPGKKRPVEPSPQRSPDSSTGIGKKGQQPAKKRLNFGQTGDSESVPDPQPLGEPPAGPSGLGSGTMAAGGGAPMADNNEGADGVGNASGNWHCDSTWLGDRVITTSTRTWALPTYNNHLYKQISSXSSGSTNDNHYFGYSTPWGYFDFNRFHCHFSPRDWQRLINNNWGFRPKRLNFKLFNIQVKEVTTNDGVTTIANNLTSTVQVFSDSEYQLPYVLGSAHQGCLPPFPADVFMIPQYGYLTLNNGSQAVGRSSFYCLEYFPSQMLRTGNNFTFSYTFEDVPFHSSYAHSQSLDRLMNPLIDQYLYYLXRTQSTGGTAGNRELLFSQGGPXNMSAQAKNWLPGPCYRQQRVSKTLSQNNNSNFAWTGATKYHLNGRDSLVNPGVAMATHKDDEXRFFPSSGVLIFGKXGAGANNTXLXNVMXTXEEEIKTTNPVATEQYGVVASNLQSSNTAPXTGXVNSQGALPGMVWQNRDVYLQGPIWAKIPHTDGNFHPSPLMGGFGLKHPPPQILIKNTPVPANPPAXFXPAKFASFITQYSTGQVSVEIEWELQKENSKRWNPEIQYTSNYAKSTNVDFAVNXEGVYSEPRPIGTRYLTRNL

SEQ ID NO: 2149 - DNA, 2217 bp, Artificial Sequence
  Description of Artificial Sequence: Synthetic polynucleotide
atggctgccgatggttatcttccagattggctcgaggacactctctctgaaggaataagacagtggtggaagctcaaacctggcccaccaccaccaaagcccgcagagcggcataaggacgacagcaggggtcttgtgcttcctgggtacaagtacctcggacccttcaacggactcgacaagggagagccggtcaacgaggcagacgccgcggccctcgagcacgacaaagcctacgaccggcagctcgacagcggagacaacccgtacctcaagtacaaccacgccgacgcggagtttcaggagcgccttaaagaagatacgtcttttgggggcaacctcggacgagcagtcttccaggcgaaaaagagggttcttgaacctctgggcctggttgaggaacctgttaagacggctccgggaaagaagagaccggtagagccatcaccccagcgttctccagactcctctacgggcatcggcaagaaaggccaacagcccgccagaaaaagactcaattttggtcagactggcgactcagagtcagttccagaccctcaacctctcggagaacctccagcagcgccctctggtgtgggacctaatacaatggctgcaggcggtggcgcaccaatggcagacaataacgaaggcgccgacggagtgggtagttcctcgggaaattggcattgcgattccacatggctgggcgacagagtcatcaccaccagcacccgaacctgggccctgcccacctacaacaaccacctctacaagcaaatctccaacgggacatcgggaggagccaccaacgacaacacctacttcggctacagcaccccctgggggtattttgactttaacagattccactgccacttttcaccacgtgactggcagcgactcatcaacaacaactggggattccggcccaagagactcagcttcaagctcttcaacatccaggtcaaggaggtcacgcagaatgaaggcaccaagaccatcgccaataacctcaccagcaccatccaggtgtttacggactcggagtaccagctgccgtacgttctcggctctgcccaccagggctgcctgcctccgttcccggcggacgtgttcatgattccccagtacggctacctaacactcaacaacggtagtcaggccgtgggacgctcctccttctactgcctggaatactttccttcgcagatgctgagaaccggcaacaacttccagtttacttacaccttcgaggacgtgcctttccacagcagctacgcccacagccagagcttggaccggctgatgaatcctctgattgaccagtacctgtactacttgtctcggactcaaacaacaggaggcacggcaaatacgcagactctgggcttcagccaaggtgggcctaatacaatggccaatcaggcaaagaactggctgccaggaccctgttaccgccaacaacgcgtctcaacgacaaccgggcaaaacaacaatagcaactttgcctggactgctgggaccaaataccatctgaatggaagaaattcattggctaatcctggcatcgctatggcaacacacaaagacgacgaggagcgtttttttcccagtaacgggatcctgatttttggcaaacaaaatgctgccagagacaatgcggattacagcgatgtcatgctcaccagcgaggaagaaatcaaaaccactaaccctgtggctacagaggaatacggtatcgtggcagataacttgcagcagcaaaacacggctcctcaaattggaactgtcaacagccagggggccttacccggtatggtctggcagaaccgggacgtgtacctgcagggtcccatctgggccaagattcctcacacggacggcaacttccacccgtctccgctgatgggcggctttggcctgaaacatcctccgcctcagatcctgatcaagaacacgcctgtacctgcggatcctccgaccaccttcaaccagtcaaagctgaactctttcatcacgcaatacagcaccggacaggtcagcgtggaaattgaatgggagctgcagaaggaaaacagcaagcgctggaaccccgagatccagtacacctccaactactacaaatctacaagtgtggactttgctgttaatacagaaggcgtgtactctgaaccccgccccattggcacccgttacctcacccgtaatctgtaa

SEQ ID NO: 2150 - protein, 733 aa, Artificial Sequence; identical to SEQ ID NO: 1935
  Description of Artificial Sequence: Synthetic polypeptide

SEQ ID NO: 2151 - DNA, 2203 bp, Artificial Sequence
  Description of Artificial Sequence: Synthetic polynucleotide
atgtcttttgttgatcaccctccagattggttggaagaagttggtgaaggtcttcgcgagtttttgggccttgaagcgggcccaccgaaaccaaaacccaatcagcagcatcaagatcaagcccgtggtcttgtgctgcctggttataactatctcggacccggaaacggtctcgatcgaggagagcctgtcaacagggcagacgaggtcgcgcgagagcacgacatctcgtacaacgagcagcttgaggcgggagacaacccctacctcaagtacaaccacgcggacgccgagtttcaggagaagctcgccgacgacacatccttcgggggaaacctcggaaaggcagtctttcaggccaagaaaagggttctcgaaccttttggcctggttgaagagggtgctaagacggcccctaccggaaagcggatagacgaccactttccaaaaagaaagaaggctcggaccgaagaggactccaagccttccacctcgtcagacgccgaagctggacccagcggatcccagcagctgcaaatcccagcccaaccagcctcaagtttgggagctgatacaatgtctgcgggaggtggcggcccattgggcgacaataaccaaggtgccgatggagtgggcaatgcctcgggagattggcattgcgattccacgtggatgggggacagagtcgtcaccaagtccacccgaacctgggtgctgcccagctacaacaaccaccagtaccgagagatcaaaagcggctccgtcgacggaagcaacgccaacgcctactttggatacagcaccccctgggggtactttgactttaaccgcttccacagccactggagcccccgagactggcaaagactcatcaacaactactggggcttcagaccccggtccctcagagtcaaaatcttcaacattcaagtcaaagaggtcacggtgcaggactccaccaccaccatcgccaacaacctcacctccaccgtccaagtgtttacggacgacgactaccagctgccctacgtcgtcggcaacgggaccgagggatgcctgccggccttccctccgcaggtctttacgctgccgcagtacggttacgcgacgctgaaccgcgacaacacagaaaatcccaccgagaggagcagcttcttctgcctagagtactttcccagcaagatgctgagaacgggcaacaactttgagtttacctacaactttgaggaggtgcccttccactccagcttcgctcccagtcagaacctgttcaagctggccaacccgctggtggaccagtacttgtaccgcttcgtgagcacaaataacactggcggagtccagttcaacaagaacctggccgggagatacgccaacacctacaaaaactggttcccggggcccatgggccgaacccagggctggaacctgggctccggggtcaaccgcgccagtgtcagcgccttcgccacgaccaataggatggagctcgagggcgcgagttaccaggtgcccccgcagccgaacggcatgaccaacaacctccagggcagcaacacctatgccctggagaacactatgatcttcaacagccagccggcgaacccgggcaccaccgccacgtacctcgagggcaacatgctcatcaccagcgagagcgagacgcagccggtgaaccgcgtggcgtacaacgtcggcgggcaggtggccaccaacaaccagagctccaccactgcccccgcgaccggcacgtacaacctccaggaaatcgtgcccggcagcgtgtggatggagagggacgtgtacctccaaggacccatctgggccaagatcccagagacgggggcgcactttcacccctctccggccatgggcggattcggactcaaacacccaccgcccatgatgctcatcaagaacacgcctgtgcccggaaatatcaccagcttctcggacgtgcccgtcagcagcttcatcacccagtacagcaccgggcaggtcaccgtggagatggagtgggagctcaagaaggaaaactccaagaggtggaacccagagatccagtacacaaacaactacaacgacccccagtttgtggactttgccccggacagcaccggggaatacagaaccaccagacctatcggaacccgataccttacccgacccctttaacccattcatgtcgcataccctcaataaa

SEQ ID NO: 2152 - protein, 724 aa, Artificial Sequence
  Description of Artificial Sequence: Synthetic polypeptide
MSFVDHPPDWLEEVGEGLREFLGLEAGPPKPKPNQQHQDQARGLVLPGYNYLGPGNGLDRGEPVNRADEVAREHDISYNEQLEAGDNPYLKYNHADAEFQEKLADDTSFGGNLGKAVFQAKKRVLEPFGLVEEGAKTAPTGKRIDDHFPKRKKARTEEDSKPSTSSDAEAGPSGSQQLQIPAQPASSLGADTMSAGGGGPLGDNNQGADGVGNASGDWHCDSTWMGDRVVTKSTRTWVLPSYNNHQYREIKSGSVDGSNANAYFGYSTPWGYFDFNRFHSHWSPRDWQRLINNYWGFRPRSLRVKIFNIQVKEVTVQDSTTTIANNLTSTVQVFTDDDYQLPYVVGNGTEGCLPAFPPQVFTLPQYGYATLNRDNTENPTERSSFFCLEYFPSKMLRTGNNFEFTYNFEEVPFHSSFAPSQNLFKLANPLVDQYLYRFVSTNNTGGVQFNKNLAGRYANTYKNWFPGPMGRTQGWNLGSGVNRASVSAFATTNRMELEGASYQVPPQPNGMTNNLQGSNTYALENTMIFNSQPANPGTTATYLEGNMLITSESETQPVNRVAYNVGGQVATNNQSSTTAPATGTYNLQEIVPGSVWMERDVYLQGPIWAKIPETGAHFHPSPAMGGFGLKHPPPMMLIKNTPVPGNITSFSDVPVSSFITQYSTGQVTVEMEWELKKENSKRWNPEIQYTNNYNDPQFVDFAPDSTGEYRTTRPIGTRYLTRPL

SEQ ID NO: 2153 - DNA, 2203 bp, Artificial Sequence
  Description of Artificial Sequence: Synthetic polynucleotide
atgtcttttgttgatcaccctccagattggttggaagaagttggtgaaggtcttcgcgagtttttgggccttgaagcgggcccaccgaaaccaaaacccaatcagcagcatcaagatcaagcccgtggtcttgtgctgcctggttataactatctcggacccggaaacggtctcgatcgaggagagcctgtcaacagggcagacgaggtcgcgcgagagcacgacatctcgtacaacgagcagcttgaggcgggagacaacccctacctcaagtacaaccacgcggacgccgagtttcaggagaagctcgccgacgacacatccttcgggggaaacctcggaaaggcagtctttcaggccaagaaaagggttctcgaaccttttggcctggttgaagagggtgctaagacggcccctaccggaaagcggatagacgaccactttccaaaaagaaagaaggctcggaccgaagaggactccaagccttccacctcgtcagacgccgaagctggacccagcggatcccagcagctgcaaatcccagcccaaccagcctcaagtttgggagctgatacaatgtctgcgggaggtggcggcccattgggcgacaataaccaaggtgccgatggagtgggcaatgcctcgggagattggcattgcgattccacgtggatgggggacagagtcgtcaccaagtccacccgaacctgggtgctgcccagctacaacaaccaccagtaccgagagatcaaaagcggctccgtcgacggaagcaacgccaacgcctactttggatacagcaccccctgggggtactttgactttaaccgcttccacagccactggagcccccgagactggcaaagactcatcaacaactactggggcttcagaccccggtccctcagagtcaaaatcttcaacattcaagtcaaagaggtcacggtgcaggactccaccaccaccatcgccaacaacctcacctccaccgtccaagtgtttacggacgacgactaccagctgccctacgtcgtcggcaacgggaccgagggatgcctgccggccttccctccgcaggtctttacgctgccgcagtacggttacgcgacgctgaaccgcgacaacacagaaaatcccaccgagaggagcagcttcttctgcctagagtactttcccagcaagatgctgagaacgggcaacaactttgagtttacctacaactttgaggaggtgcccttccactccagcttcgctcccagtcagaacctgttcaagctggccaacccgctggtggaccagtacttgtaccgcttcgtgagcacaaataacactggcggagtccagttcaacaagaacctggccgggagatacgccaacacctacaaaaactggttcccggggcccatgggccgaacccagggctggaacctgggctccggggtcaaccgcgccagtgtcagcgccttcgccacgaccaataggatggagctcgagggcgcgagttaccaggtgcccccgcagccgaacggcatgaccaacaacctccagggcagcaacacctatgccctggagaacactatgatcttcaacagccagccggcgaacccgggcaccaccgccacgtacctcgagggcaacatgctcatcaccagcgagagcgagacgcagccggtgaaccgcgtggcgtacaacgtcggcgggcagatggccaccaacaaccagagctccaccactgcccccgcgaccggcacggtcaacctccaggaaatcgtgcccggcagcgtgtggatggagagggacgtgtacctccaaggacccatctgggccaagatcccagagacgggggcgcactttcacccctctccggccatgggcggattcggactcaaacacccaccgcccatgatgctcatcaagaacacgcctgtgcccggaaatatcaccagcttctcggacgtgcccgtcagcagcttcatcacccagtacagcaccgggcaggtcaccgtggagatggagtgggagctcaagaaggaaaactccaagaggtggaacccagagatccagtacacaaacaactacaacgacccccagtttgtggactttgccccggacagcaccggggaatacagaaccaccagacctatcggaacccgataccttacccgacccctttaacccattcatgtcgcataccctcaataaa

SEQ ID NO: 2154 - protein, 724 aa, Artificial Sequence
  Description of Artificial Sequence: Synthetic polypeptide
MSFVDHPPDWLEEVGEGLREFLGLEAGPPKPKPNQQHQDQARGLVLPGYNYLGPGNGLDRGEPVNRADEVAREHDISYNEQLEAGDNPYLKYNHADAEFQEKLADDTSFGGNLGKAVFQAKKRVLEPFGLVEEGAKTAPTGKRIDDHFPKRKKARTEEDSKPSTSSDAEAGPSGSQQLQIPAQPASSLGADTMSAGGGGPLGDNNQGADGVGNASGDWHCDSTWMGDRVVTKSTRTWVLPSYNNHQYREIKSGSVDGSNANAYFGYSTPWGYFDFNRFHSHWSPRDWQRLINNYWGFRPRSLRVKIFNIQVKEVTVQDSTTTIANNLTSTVQVFTDDDYQLPYVVGNGTEGCLPAFPPQVFTLPQYGYATLNRDNTENPTERSSFFCLEYFPSKMLRTGNNFEFTYNFEEVPFHSSFAPSQNLFKLANPLVDQYLYRFVSTNNTGGVQFNKNLAGRYANTYKNWFPGPMGRTQGWNLGSGVNRASVSAFATTNRMELEGASYQVPPQPNGMTNNLQGSNTYALENTMIFNSQPANPGTTATYLEGNMLITSESETQPVNRVAYNVGGQMATNNQSSTTAPATGTVNLQEIVPGSVWMERDVYLQGPIWAKIPETGAHFHPSPAMGGFGLKHPPPMMLIKNTPVPGNITSFSDVPVSSFITQYSTGQVTVEMEWELKKENSKRWNPEIQYTNNYNDPQFVDFAPDSTGEYRTTRPIGTRYLTRPL

SEQ ID NO: 2155 - DNA, 2203 bp, Artificial Sequence
  Description of Artificial Sequence: Synthetic polynucleotide
atgtcttttgttgatcaccctccagattggttggaagaagttggtgaaggtcttcgcgagtttttgggccttgaagcgggcccaccgaaaccaaaacccaatcagcagcatcaagatcaagcccgtggtcttgtgctgcctggttataactatctcggacccggaaacggtctcgatcgaggagagcctgtcaacagggcagacgaggtcgcgcgagagcacgacatctcgtacaacgagcagcttgaggcgggagacaacccctacctcaagtacaaccacgcggacgccgagtttcaggagaagctcgccgacgacacatccttcgggggaaacctcggaaaggcagtctttcaggccaagaaaagggttctcgaaccttttggcctggttgaagagggtgctaagacggcccctaccggaaagcggatagacgaccactttccaaaaagaaagaaggctcggaccgaagaggactccaagccttccacctcgtcagacgccgaagctggacccagcggatcccagcagctgcaaatcccagcccaaccagcctcaagtttgggagctgatacaatgtctgcgggaggtggcggcccattgggcgacaataaccaaggtgccgatggagtgggcaatgcctcgggagattggcattgcgattccacgtggatgggggacagagtcgtcaccaagtccacccgaacctgggtgctgcccagctacaacaaccaccagtaccgagagatcaaaagcggctccgtcgacggaagcaacgccaacgcctactttggatacagcaccccctgggggtactttgactttaaccgcttccacagccactggagcccccgagactggcaaagactcatcaacaactactggggcttcagaccccggtccctcagagtcaaaatcttcaacattcaagtcaaagaggtcacggtgcaggactccaccaccaccatcgccaacaacctcacctccaccgtccaagtgtttacggacgacgactaccagctgccctacgtcgtcggcaacgggaccgagggatgcctgccggccttccctccgcaggtctttacgctgccgcagtacggttacgcgacgctgaaccgcgacaacacagaaaatcccaccgagaggagcagcttcttctgcctagagtactttcccagcaagatgctgagaacgggcaacaactttgagtttacctacaactttgaggaggtgcccttccactccagcttcgctcccagtcagaacctgttcaagctggccaacccgctggtggaccagtacttgtaccgcttcgtgagcacaaataacactggcggagtccagttcaacaagaacctggccgggagatacgccaacacctacaaaaactggttcccggggcccatgggccgaacccagggctggaacctgggctccggggtcaaccgcgccagtgtcagcgccttcgccacgaccaataggatggagctcgagggcgcgagttaccaggtgcccccgcagccgaacggcatgaccaacaacctccagggcagcaacacctatgccctggagaacactatgatcttcaacagccagccggcgaacccgggcaccaccgccacgtacctcgagggcaacatgctcatcaccagcgagagcgagacgcagccggtgaaccgcgtggcgtacaacgtcggcgggcagatggccaccaacaaccagagctccaccactgcccccgcgaccggcacgtacaacacccaggaaatcgtgcccggcagcgtgtggatggagagggacgtgtacctccaaggacccatctgggccaagatcccagagacgggggcgcactttcacccctctccggccatgggcggattcggactcaaacacccaccgcccatgatgctcatcaagaacacgcctgtgcccggaaatatcaccagcttctcggacgtgcccgtcagcagcttcatcacccagtacagcaccgggcaggtcaccgtggagatggagtgggagctcaagaaggaaaactccaagaggtggaacccagagatccagtacacaaacaactacaacgacccccagtttgtggactttgccccggacagcaccggggaatacagaaccaccagacctatcggaacccgataccttacccgacccctttaacccattcatgtcgcataccctcaataaa

SEQ ID NO: 2156 - protein, 724 aa, Artificial Sequence
  Description of Artificial Sequence: Synthetic polypeptide
MSFVDHPPDWLEEVGEGLREFLGLEAGPPKPKPNQQHQDQARGLVLPGYNYLGPGNGLDRGEPVNRADEVAREHDISYNEQLEAGDNPYLKYNHADAEFQEKLADDTSFGGNLGKAVFQAKKRVLEPFGLVEEGAKTAPTGKRIDDHFPKRKKARTEEDSKPSTSSDAEAGPSGSQQLQIPAQPASSLGADTMSAGGGGPLGDNNQGADGVGNASGDWHCDSTWMGDRVVTKSTRTWVLPSYNNHQYREIKSGSVDGSNANAYFGYSTPWGYFDFNRFHSHWSPRDWQRLINNYWGFRPRSLRVKIFNIQVKEVTVQDSTTTIANNLTSTVQVFTDDDYQLPYVVGNGTEGCLPAFPPQVFTLPQYGYATLNRDNTENPTERSSFFCLEYFPSKMLRTGNNFEFTYNFEEVPFHSSFAPSQNLFKLANPLVDQYLYRFVSTNNTGGVQFNKNLAGRYANTYKNWFPGPMGRTQGWNLGSGVNRASVSAFATTNRMELEGASYQVPPQPNGMTNNLQGSNTYALENTMIFNSQPANPGTTATYLEGNMLITSESETQPVNRVAYNVGGQMATNNQSSTTAPATGTYNTQEIVPGSVWMERDVYLQGPIWAKIPETGAHFHPSPAMGGFGLKHPPPMMLIKNTPVPGNITSFSDVPVSSFITQYSTGQVTVEMEWELKKENSKRWNPEIQYTNNYNDPQFVDFAPDSTGEYRTTRPIGTRYLTRPL

SEQ ID NO: 2157 - DNA, 2203 bp, Artificial Sequence
  Description of Artificial Sequence: Synthetic polynucleotide
atgtcttttgttgatcaccctccagattggttggaagaagttggtgaaggtcttcgcgagtttttgggccttgaagcgggcccaccgaaaccaaaacccaatcagcagcatcaagatcaagcccgtggtcttgtgctgcctggttataactatctcggacccggaaacggtctcgatcgaggagagcctgtcaacagggcagacgaggtcgcgcgagagcacgacatctcgtacaacgagcagcttgaggcgggagacaacccctacctcaagtacaaccacgcggacgccgagtttcaggagaagctcgccgacgacacatccttcgggggaaacctcggaaaggcagtctttcaggccaagaaaagggttctcgaaccttttggcctggttgaagagggtgctaagacggcccctaccggaaagcggatagacgaccactttccaaaaagaaagaaggctcggaccgaagaggactccaagccttccacctcgtcagacgccgaagctggacccagcggatcccagcagctgcaaatcccagcccaaccagcctcaagtttgggagctgatacaatgtctgcgggaggtggcggcccattgggcgacaataaccaaggtgccgatggagtgggcaatgcctcgggagattggcattgcgattccacgtggatgggggacagagtcgtcaccaagtccacccgaacctgggtgctgcccagctacaacaaccaccagtaccgagagatcaaaagcggctccgtcgacggaagcaacgccaacgcctactttggatacagcaccccctgggggtactttgactttaaccgcttccacagccactggagcccccgagactggcaaagactcatcaacaactactggggcttcagaccccggtccctcagagtcaaaatcttcaacattcaagtcaaagaggtcacggtgcaggactccaccaccaccatcgccaacaacctcacctccaccgtccaagtgtttacggacgacgactaccagctgccctacgtcgtcggcaacgggaccgagggatgcctgccggccttccctccgcaggtctttacgctgccgcagtacggttacgcgacgctgaaccgcgacaacacagaaaatcccaccgagaggagcagcttcttctgcctagagtactttcccagcaagatgctgagaacgggcaacaactttgagtttacctacaactttgaggaggtgcccttccactccagcttcgctcccagtcagaacctgttcaagctggccaacccgctggtggaccagtacttgtaccgcttcgtgagcacaaataacactggcggagtccagttcaacaagaacctggccgggagatacgccaacacctacaaaaactggttcccggggcccatgggccgaacccagggctggaacctgggctccggggtcaaccgcgccagtgtcagcgccttcgccacgaccaataggatggagctcgagggcgcgagttaccaggtgcccccgcagccgaacggcatgaccaacaacctccagggcagcaacacctatgccctggagaacactatgatcttcaacagccagccggcgaacccgggcaccaccgccacgtacctcgagggcaacatgctcatcaccagcgagagcgagacgcagccggtgaaccgcgtggcgtacaacgtcggcgggcagatggccaccaacaaccagagctccaccactgcccccgcgaccggcacggtcaacacccaggaaatcgtgcccggcagcgtgtggatggagagggacgtgtacctccaaggacccatctgggccaagatcccagagacgggggcgcactttcacccctctccggccatgggcggattcggactcaaacacccaccgcccatgatgctcatcaagaacacgcctgtgcccggaaatatcaccagcttctcggacgtgcccgtcagcagcttcatcacccagtacagcaccgggcaggtcaccgtggagatggagtgggagctcaagaaggaaaactccaagaggtggaacccagagatccagtacacaaacaactacaacgacccccagtttgtggactttgccccggacagcaccggggaatacagaaccaccagacctatcggaacccgataccttacccgacccctttaacccattcatgtcgcataccctcaataaa

SEQ ID NO: 2158 - protein, 724 aa, Artificial Sequence
  Description of Artificial Sequence: Synthetic polypeptide
MSFVDHPPDWLEEVGEGLREFLGLEAGPPKPKPNQQHQDQARGLVLPGYNYLGPGNGLDRGEPVNRADEVAREHDISYNEQLEAGDNPYLKYNHADAEFQEKLADDTSFGGNLGKAVFQAKKRVLEPFGLVEEGAKTAPTGKRIDDHFPKRKKARTEEDSKPSTSSDAEAGPSGSQQLQIPAQPASSLGADTMSAGGGGPLGDNNQGADGVGNASGDWHCDSTWMGDRVVTKSTRTWVLPSYNNHQYREIKSGSVDGSNANAYFGYSTPWGYFDFNRFHSHWSPRDWQRLINNYWGFRPRSLRVKIFNIQVKEVTVQDSTTTIANNLTSTVQVFTDDDYQLPYVVGNGTEGCLPAFPPQVFTLPQYGYATLNRDNTENPTERSSFFCLEYFPSKMLRTGNNFEFTYNFEEVPFHSSFAPSQNLFKLANPLVDQYLYRFVSTNNTGGVQFNKNLAGRYANTYKNWFPGPMGRTQGWNLGSGVNRASVSAFATTNRMELEGASYQVPPQPNGMTNNLQGSNTYALENTMIFNSQPANPGTTATYLEGNMLITSESETQPVNRVAYNVGGQMATNNQSSTTAPATGTVNTQEIVPGSVWMERDVYLQGPIWAKIPETGAHFHPSPAMGGFGLKHPPPMMLIKNTPVPGNITSFSDVPVSSFITQYSTGQVTVEMEWELKKENSKRWNPEIQYTNNYNDPQFVDFAPDSTGEYRTTRPIGTRYLTRPL

SEQ ID NO: 2159 - DNA, 2203 bp, Artificial Sequence
  Description of Artificial Sequence: Synthetic polynucleotide
atgtcttttgttgatcaccctccagattggttggaagaagttggtgaaggtcttcgcgagtttttgggccttgaagcgggcccaccgaaaccaaaacccaatcagcagcatcaagatcaagcccgtggtcttgtgctgcctggttataactatctcggacccggaaacggtctcgatcgaggagagcctgtcaacagggcagacgaggtcgcgcgagagcacgacatctcgtacaacgagcagcttgaggcgggagacaacccctacctcaagtacaaccacgcggacgccgagtttcaggagaagctcgccgacgacacatccttcgggggaaacctcggaaaggcagtctttcaggccaagaaaagggttctcgaaccttttggcctggttgaagagggtgctaagacggcccctaccggaaagcggatagacgaccactttccaaaaagaaagaaggctcggaccgaagaggactccaagccttccacctcgtcagacgccgaagctggacccagcggatcccagcagctgcaaatcccagcccaaccagcctcaagtttgggagctgatacaatgtctgcgggaggtggcggcccattgggcgacaataaccaaggtgccgatggagtgggcaatgcctcgggagattggcattgcgattccacgtggatgggggacagagtcgtcaccaagtccacccgaacctgggtgctgcccagctacaacaaccaccagtaccgagagatcaaaagcggctccgtcgacggaagcaacgccaacgcctactttggatacagcaccccctgggggtactttgactttaaccgcttccacagccactggagcccccgagactggcaaagactcatcaacaactactggggcttcagaccccggtccctcagagtcaaaatcttcaacattcaagtcaaagaggtcacggtgcaggactccaccaccaccatcgccaacaacctcacctccaccgtccaagtgtttacggacgacgactaccagctgccctacgtcgtcggcaacgggaccgagggatgcctgccggccttccctccgcaggtctttacgctgccgcagtacggttacgcgacgctgaaccgcgacaacacagaaaatcccaccgagaggagcagcttcttctgcctagagtactttcccagcaagatgctgagaacgggcaacaactttgagtttacctacaactttgaggaggtgcccttccactccagcttcgctcccagtcagaacctgttcaagctggccaacccgctggtggaccagtacttgtaccgcttcgtgagcacaaataacactggcggagtccagttcaacaagaacctggccgggagatacgccaacacctacaaaaactggttcccggggcccatgggccgaacccagggctggaacctgggctccggggtcaaccgcgccagtgtcagcgccttcgccacgaccaataggatggagctcgagggcgcgagttaccaggtgcccccgcagccgaacggcatgaccaacaacctccagggcagcaacacctatgccctggagaacactatgatcttcaacagccagccggcgaacccgggcaccaccgccacgtacctcgagggcaacatgctcatcaccagcgagagcgagacgcagccggtgaaccgcgtggcgtacaacgtcggcgggcagatggccaccaacaaccagagctccaccactgcccccgcgaccggcacgtacaacctccaggaaatcgtgcccggcagcgtgtggatggagagggacgtgtacctccaaggacccatctgggccaagatcccagagacgggggcgcactttcacccctctccggccatgggcggattcggactcaaacacccaccgcccatgatgctcatcaagaacacgcctgtgcccggaaatatcaccagcttctcggccgtgcccgtcagcagcttcatcacccagtacagcaccgggcaggtcaccgtggagatggagtgggagctcaagaaggaaaactccaagaggtggaacccagagatccagtacacaaacaactacaacgacccccagtttgtggactttgccccggacagcaccggggaatacagaaccaccagacctatcggaacccgataccttacccgacccctttaacccattcatgtcgcataccctcaataaa

SEQ ID NO: 2160 - protein, 724 aa, Artificial Sequence
  Description of Artificial Sequence: Synthetic polypeptide
MSFVDHPPDWLEEVGEGLREFLGLEAGPPKPKPNQQHQDQARGLVLPGYNYLGPGNGLDRGEPVNRADEVAREHDISYNEQLEAGDNPYLKYNHADAEFQEKLADDTSFGGNLGKAVFQAKKRVLEPFGLVEEGAKTAPTGKRIDDHFPKRKKARTEEDSKPSTSSDAEAGPSGSQQLQIPAQPASSLGADTMSAGGGGPLGDNNQGADGVGNASGDWHCDSTWMGDRVVTKSTRTWVLPSYNNHQYREIKSGSVDGSNANAYFGYSTPWGYFDFNRFHSHWSPRDWQRLINNYWGFRPRSLRVKIFNIQVKEVTVQDSTTTIANNLTSTVQVFTDDDYQLPYVVGNGTEGCLPAFPPQVFTLPQYGYATLNRDNTENPTERSSFFCLEYFPSKMLRTGNNFEFTYNFEEVPFHSSFAPSQNLFKLANPLVDQYLYRFVSTNNTGGVQFNKNLAGRYANTYKNWFPGPMGRTQGWNLGSGVNRASVSAFATTNRMELEGASYQVPPQPNGMTNNLQGSNTYALENTMIFNSQPANPGTTATYLEGNMLITSESETQPVNRVAYNVGGQMATNNQSSTTAPATGTYNLQEIVPGSVWMERDVYLQGPIWAKIPETGAHFHPSPAMGGFGLKHPPPMMLIKNTPVPGNITSFSAVPVSSFITQYSTGQVTVEMEWELKKENSKRWNPEIQYTNNYNDPQFVDFAPDSTGEYRTTRPIGTRYLTRPL

SEQ ID NO: 2161 - DNA, 2203 bp, Artificial Sequence
  Description of Artificial Sequence: Synthetic polynucleotide
atgtcttttgttgatcaccctccagattggttggaagaagttggtgaaggtcttcgcgagtttttgggccttgaagcgggcccaccgaaaccaaaacccaatcagcagcatcaagatcaagcccgtggtcttgtgctgcctggttataactatctcggacccggaaacggtctcgatcgaggagagcctgtcaacagggcagacgaggtcgcgcgagagcacgacatctcgtacaacgagcagcttgaggcgggagacaacccctacctcaagtacaaccacgcggacgccgagtttcaggagaagctcgccgacgacacatccttcgggggaaacctcggaaaggcagtctttcaggccaagaaaagggttctcgaaccttttggcctggttgaagagggtgctaagacggcccctaccggaaagcggatagacgaccactttccaaaaagaaagaaggctcggaccgaagaggactccaagccttccacctcgtcagacgccgaagctggacccagcggatcccagcagctgcaaatcccagcccaaccagcctcaagtttgggagctgatacaatgtctgcgggaggtggcggcccattgggcgacaataaccaaggtgccgatggagtgggcaatgcctcgggagattggcattgcgattccacgtggatgggggacagagtcgtcaccaagtccacccgaacctgggtgctgcccagctacaacaaccaccagtaccgagagatcaaaagcggctccgtcgacggaagcaacgccaacgcctactttggatacagcaccccctgggggtactttgactttaaccgcttccacagccactggagcccccgagactggcaaagactcatcaacaactactggggcttcagaccccggtccctcagagtcaaaatcttcaacattcaagtcaaagaggtcacggtgcaggactccaccaccaccatcgccaacaacctcacctccaccgtccaagtgtttatggacgacgactaccagctgccctacgtcgtcggcaacgggaccgagggatgcctgccggccttccctccgcaggtctttacgctgccgcagtacggttacgcgacgctgaaccgcgacaacacagaaaatcccaccgagaggagcagcttcttctgcctagagtactttcccagcaagatgctgagaacgggcaacaactttgagtttacctacaactttgaggaggtgcccttccactccagcttcgctcccagtcagaacctgttcaagctggccaacccgctggtggaccagtacttgtaccgcttcgtgagcacaaataacactggcggagtccagttcaacaagaacctggccgggagatacgccaacacctacaaaaactggttcccggggcccatgggccgaacccagggctggaacctgggctccggggtcaaccgcgccagtgtcagcgccttcgccacgaccaataggatggagctcgagggcgcgagttaccaggtgcccccgcagccgaacggcatgaccaacaacctccagggcagcaacacctatgccctggagaacactatgatcttcaacagccagccggcgaacccgggcaccaccgccacgtacctcgagggcaacatgctcatcaccagcgagagcgagacgcagccggtgaaccgcgtggcgtacaacgtcggcgggcagatggccaccaacaaccagagctccaccactgcccccgcgaccggcacgtacaacctccaggaaatcgtgcccggcagcgtgtggatggagagggacgtgtacctccaaggacccatctgggccaagatcccagagacgggggcgcactttcacccctctccggccatgggcggattcggactcaaacacccaccgcccatgatgctcatcaagaacacgcctgtgcccggaaatatcaccagcttctcggacgtgcccgtcagcagcttcatcacccagtacagcaccgggcaggtcaccgtggagatggagtgggagctcaagaaggaaaactccaagaggtggaacccagagatccagtacacaaacaactacaacgacccccagtttgtggactttgccccggacagcaccggggaatacagaaccaccagacctatcggaacccgataccttacccgacccctttaacccattcatgtcgcataccctcaataaa

SEQ ID NO: 2162 - protein, 724 aa, Artificial Sequence
  Description of Artificial Sequence: Synthetic polypeptide
MSFVDHPPDWLEEVGEGLREFLGLEAGPPKPKPNQQHQDQARGLVLPGYNYLGPGNGLDRGEPVNRADEVAREHDISYNEQLEAGDNPYLKYNHADAEFQEKLADDTSFGGNLGKAVFQAKKRVLEPFGLVEEGAKTAPTGKRIDDHFPKRKKARTEEDSKPSTSSDAEAGPSGSQQLQIPAQPASSLGADTMSAGGGGPLGDNNQGADGVGNASGDWHCDSTWMGDRVVTKSTRTWVLPSYNNHQYREIKSGSVDGSNANAYFGYSTPWGYFDFNRFHSHWSPRDWQRLINNYWGFRPRSLRVKIFNIQVKEVTVQDSTTTIANNLTSTVQVFMDDDYQLPYVVGNGTEGCLPAFPPQVFTLPQYGYATLNRDNTENPTERSSFFCLEYFPSKMLRTGNNFEFTYNFEEVPFHSSFAPSQNLFKLANPLVDQYLYRFVSTNNTGGVQFNKNLAGRYANTYKNWFPGPMGRTQGWNLGSGVNRASVSAFATTNRMELEGASYQVPPQPNGMTNNLQGSNTYALENTMIFNSQPANPGTTATYLEGNMLITSESETQPVNRVAYNVGGQMATNNQSSTTAPATGTYNLQEIVPGSVWMERDVYLQGPIWAKIPETGAHFHPSPAMGGFGLKHPPPMMLIKNTPVPGNITSFSDVPVSSFITQYSTGQVTVEMEWELKKENSKRWNPEIQYTNNYNDPQFVDFAPDSTGEYRTTRPIGTRYLTRPL

SEQ ID NO: 2163 - DNA, 2203 bp, Artificial Sequence
  Description of Artificial Sequence: Synthetic polynucleotide
atgtcttttgttgatcaccctccagattggttggaagaagttggtgaaggtcttcgcgagtttttgggccttgaagcgggcccaccgaaaccaaaacccaatcagcagcatcaagatcaagcccgtggtcttgtgctgcctggttataactatctcggacccggaaacggtctcgatcgaggagagcctgtcaacagggcagacgaggtcgcgcgagagcacgacatctcgtacaacgagcagcttgaggcgggagacaacccctacctcaagtacaaccacgcggacgccgagtttcaggagaagctcgccgacgacacatccttcgggggaaacctcggaaaggcagtctttcaggccaagaaaagggttctcgaaccttttggcctggttgaagagggtgctaagacggcccctaccggaaagcggatagacgaccactttccaaaaagaaagaaggctcggaccgaagaggactccaagccttccacctcgtcagacgccgaagctggacccagcggatcccagcagctgcaaatcccagcccaaccagcctcaagtttgggagctgatacaatgtctgcgggaggtggcggcccattgggcgacaataaccaaggtgccgatggagtgggcaatgcctcgggagattggcattgcgattccacgtggatgggggacagagtcgtcaccaagtccacccgaacctgggtgctgcccagctacaacaaccaccagtaccgagagatcaaaagcggctccgtcgacggaagcaacgccaacgcctactttggatacagcaccccctgggggtactttgactttaaccgcttccacagccactggagcccccgagactggcaaagactcatcaacaactactggggcttcagaccccggtccctcagagtcaaaatcttcaacattcaagtcaaagaggtcacggtgcaggactccaccaccaccatcgccaacaacctcacctccaccgtcgatgtgtttacggacgacgactaccagctgccctacgtcgtcggcaacgggaccgagggatgcctgccggccttccctccgcaggtctttacgctgccgcagtacggttacgcgacgctgaaccgcgacaacacagaaaatcccaccgagaggagcagcttcttctgcctagagtactttcccagcaagatgctgagaacgggcaacaactttgagtttacctacaactttgaggaggtgcccttccactccagcttcgctcccagtcagaacctgttcaagctggccaacccgctggtggaccagtacttgtaccgcttcgtgagcacaaataacactggcggagtccagttcaacaagaacctggccgggagatacgccaacacctacaaaaactggttcccggggcccatgggccgaacccagggctggaacctgggctccggggtcaaccgcgccagtgtcagcgccttcgccacgaccaataggatggagctcgagggcgcgagttaccaggtgcccccgcagccgaacggcatgaccaacaacctccagggcagcaacacctatgccctggagaacactatgatcttcaacagccagccggcgaacccgggcaccaccgccacgtacctcgagggcaacatgctcatcaccagcgagagcgagacgcagccggtgaaccgcgtggcgtacaacgtcggcgggcagatggccaccaacaaccagagctccaccactgcccccgcgaccggcacgtacaacctccaggaaatcgtgcccggcagcgtgtggatggagagggacgtgtacctccaaggacccatctgggccaagatcccagagacgggggcgcactttcacccctctccggccatgggcggattcggactcaaacacccaccgcccatgatgctcatcaagaacacgcctgtgcccggaaatatcaccagcttctcggacgtgcccgtcagcagcttcatcacccagtacagcaccgggcaggtcaccgtggagatggagtgggagctcaagaaggaaaactccaagaggtggaacccagagatccagtacacaaacaactacaacgacccccagtttgtggactttgccccggacagcaccggggaatacagaaccaccagacctatcggaacccgataccttacccgacccctttaacccattcatgtcgcataccctcaataaa

SEQ ID NO: 2164 - protein, 724 aa, Artificial Sequence
  Description of Artificial Sequence: Synthetic polypeptide
MSFVDHPPDWLEEVGEGLREFLGLEAGPPKPKPNQQHQDQARGLVLPGYNYLGPGNGLDRGEPVNRADEVAREHDISYNEQLEAGDNPYLKYNHADAEFQEKLADDTSFGGNLGKAVFQAKKRVLEPFGLVEEGAKTAPTGKRIDDHFPKRKKARTEEDSKPSTSSDAEAGPSGSQQLQIPAQPASSLGADTMSAGGGGPLGDNNQGADGVGNASGDWHCDSTWMGDRVVTKSTRTWVLPSYNNHQYREIKSGSVDGSNANAYFGYSTPWGYFDFNRFHSHWSPRDWQRLINNYWGFRPRSLRVKIFNIQVKEVTVQDSTTTIANNLTSTVDVFTDDDYQLPYVVGNGTEGCLPAFPPQVFTLPQYGYATLNRDNTENPTERSSFFCLEYFPSKMLRTGNNFEFTYNFEEVPFHSSFAPSQNLFKLANPLVDQYLYRFVSTNNTGGVQFNKNLAGRYANTYKNWFPGPMGRTQGWNLGSGVNRASVSAFATTNRMELEGASYQVPPQPNGMTNNLQGSNTYALENTMIFNSQPANPGTTATYLEGNMLITSESETQPVNRVAYNVGGQMATNNQSSTTAPATGTYNLQEIVPGSVWMERDVYLQGPIWAKIPETGAHFHPSPAMGGFGLKHPPPMMLIKNTPVPGNITSFSDVPVSSFITQYSTGQVTVEMEWELKKENSKRWNPEIQYTNNYNDPQFVDFAPDSTGEYRTTRPIGTRYLTRPL

SEQ ID NO: 2165 - DNA, 2203 bp, Artificial Sequence
  Description of Artificial Sequence: Synthetic polynucleotide
atgtcttttgttgatcaccctccagattggttggaagaagttggtgaaggtcttcgcgagtttttgggccttgaagcgggcccaccgaaaccaaaacccaatcagcagcatcaagatcaagcccgtggtcttgtgctgcctggttataactatctcggacccggaaacggtctcgatcgaggagagcctgtcaacagggcagacgaggtcgcgcgagagcacgacatctcgtacaacgagcagcttgaggcgggagacaacccctacctcaagtacaaccacgcggacgccgagtttcaggagaagctcgccgacgacacatccttcgggggaaacctcggaaaggcagtctttcaggccaagaaaagggttctcgaaccttttggcctggttgaagagggtgctaagacggcccctaccggaaagcggatagacgaccactttccaaaaagaaagaaggctcggaccgaagaggactccaagccttccacctcgtcagacgccgaagctggacccagcggatcccagcagctgcaaatcccagcccaaccagcctcaagtttgggagctgatacaatgtctgcgggaggtggcggcccattgggcgacaataaccaaggtgccgatggagtgggcaatgcctcgggagattggcattgcgattccacgtggatgggggacagagtcgtcaccaagtccacccgaacctgggtgctgcccagctacaacaaccaccagtaccgagagatcaaaagcggctccgtcgacggaagcaacgccaacgcctactttggatacagcaccccctgggggtactttgactttaaccgcttccacagccactggagcccccgagactggcaaagactcatcaacaactactggggcttcagaccccggtccctcagagtcaaaatcttcaacattcaagtcaaagaggtcacggtgcaggactccaccaccaccatcgccaacaacctcacctccaccgtccaagtgtttacggacgacgactaccagctgccctacgtcgtcggcaacgggacccagggatgcctgccggccttccctccgcaggtctttacgctgccgcagtacggttacgcgacgctgaaccgcgacaacacagaaaatcccaccgagaggagcagcttcttctgcctagagtactttcccagcaagatgctgagaacgggcaacaactttgagtttacctacaactttgaggaggtgcccttccactccagcttcgctcccagtcagaacctgttcaagctggccaacccgctggtggaccagtacttgtaccgcttcgtgagcacaaataacactggcggagtccagttcaacaagaacctggccgggagatacgccaacacctacaaaaactggttcccggggcccatgggccgaacccagggctggaacctgggctccggggtcaaccgcgccagtgtcagcgccttcgccacgaccaataggatggagctcgagggcgcgagttaccaggtgcccccgcagccgaacggcatgaccaacaacctccagggcagcaacacctatgccctggagaacactatgatcttcaacagccagccggcgaacccgggcaccaccgccacgtacctcgagggcaacatgctcatcaccagcgagagcgagacgcagccggtgaaccgcgtggcgtacaacgtcggcgggcagatggccaccaacaaccagagctccaccactgcccccgcgaccggcacgtacaacctccaggaaatcgtgcccggcagcgtgtggatggagagggacgtgtacctccaaggacccatctgggccaagatcccagagacgggggcgcactttcacccctctccggccatgggcggattcggactcaaacacccaccgcccatgatgctcatcaagaacacgcctgtgcccggaaatatcaccagcttctcggacgtgcccgtcagcagcttcatcacccagtacagcaccgggcaggtcaccgtggagatggagtgggagctcaagaaggaaaactccaagaggtggaacccagagatccagtacacaaacaactacaacgacccccagtttgtggactttgccccggacagcaccggggaatacagaaccaccagacctatcggaacccgataccttacccgacccctttaacccattcatgtcgcataccctcaataaa

SEQ ID NO: 2166 - protein, 724 aa, Artificial Sequence
  Description of Artificial Sequence: Synthetic polypeptide
MSFVDHPPDWLEEVGEGLREFLGLEAGPPKPKPNQQHQDQARGLVLPGYNYLGPGNGLDRGEPVNRADEVAREHDISYNEQLEAGDNPYLKYNHADAEFQEKLADDTSFGGNLGKAVFQAKKRVLEPFGLVEEGAKTAPTGKRIDDHFPKRKKARTEEDSKPSTSSDAEAGPSGSQQLQIPAQPASSLGADTMSAGGGGPLGDNNQGADGVGNASGDWHCDSTWMGDRVVTKSTRTWVLPSYNNHQYREIKSGSVDGSNANAYFGYSTPWGYFDFNRFHSHWSPRDWQRLINNYWGFRPRSLRVKIFNIQVKEVTVQDSTTTIANNLTSTVQVFTDDDYQLPYVVGNGTQGCLPAFPPQVFTLPQYGYATLNRDNTENPTERSSFFCLEYFPSKMLRTGNNFEFTYNFEEVPFHSSFAPSQNLFKLANPLVDQYLYRFVSTNNTGGVQFNKNLAGRYANTYKNWFPGPMGRTQGWNLGSGVNRASVSAFATTNRMELEGASYQVPPQPNGMTNNLQGSNTYALENTMIFNSQPANPGTTATYLEGNMLITSESETQPVNRVAYNVGGQMATNNQSSTTAPATGTYNLQEIVPGSVWMERDVYLQGPIWAKIPETGAHFHPSPAMGGFGLKHPPPMMLIKNTPVPGNITSFSDVPVSSFITQYSTGQVTVEMEWELKKENSKRWNPEIQYTNNYNDPQFVDFAPDSTGEYRTTRPIGTRYLTRPL

SEQ ID NO: 2167 - DNA, 2203 bp, Artificial Sequence
  Description of Artificial Sequence: Synthetic polynucleotide
atgtcttttgttgatcaccctccagattggttggaagaagttggtgaaggtcttcgcgagtttttgggccttgaagcgggcccaccgaaaccaaaacccaatcagcagcatcaagatcaagcccgtggtcttgtgctgcctggttataactatctcggacccggaaacggtctcgatcgaggagagcctgtcaacagggcagacgaggtcgcgcgagagcacgacatctcgtacaacgagcagcttgaggcgggagacaacccctacctcaagtacaaccacgcggacgccgagtttcaggagaagctcgccgacgacacatccttcgggggaaacctcggaaaggcagtctttcaggccaagaaaagggttctcgaaccttttggcctggttgaagagggtgctaagacggcccctaccggaaagcggatagacgaccactttccaaaaagaaagaaggctcggaccgaagaggactccaagccttccacctcgtcagacgccgaagctggacccagcggatcccagcagctgcaaatcccagcccaaccagcctcaagtttgggagctgatacaatgtctgcgggaggtggcggcccattgggcgacaataaccaaggtgccgatggagtgggcaatgcctcgggagattggcattgcgattccacgtggatgggggacagagtcgtcaccaagtccacccgaacctgggtgctgcccagctacaacaaccaccagtaccgagagatcaaaagcggctccgtcgacggaagcaacgccaacgcctactttggatacagcaccccctgggggtactttgactttaaccgcttccacagccactggagcccccgagactggcaaagactcatcaacaactactggggcttcagaccccggtccctcagagtcaaaatcttcaacattcaagtcaaagaggtcacggtgcaggactccaccaccaccatcgccaacaacctcacctccaccgtccaagtgtttacggacgacgactaccagctgccctacgtcgtcggcaacgggaccgagggatgcctgccggccttccctccgcaggtctttacgctgccgcagtacggttacgcgacgctgaaccgcgacaacacagaaaatcccaccgagaggagcagcttcttctgcctagagtactttcccagcaagatgctgagaacgggcaacaactttgagtttacctacaactttgaggaggtgcccttccactccagcttcgctcccagtcagaacctgttcaagctggccaacccgctggtggaccagtacttgtaccgcttcgtgagcacaaataacactggcggagtccagttcaacaagaacctggccgggagatacgccaacacctacaaaaactggttcccggggcccatgggccgaacccagggctggaacctgggctccggggtcaaccgcgccagtgtcagcgccttcgccacgaccaataggatggagctcgagggcgcgagttaccaggtgcccccgcagccgaacggcatgaccaacaacctccagggcagcaacacctatgccctggagaacactatgatcttcaacagccagtcggcgaacccgggcaccaccgccacgtacctcgagggcaacatgctcatcaccagcgagagcgagacgcagccggtgaaccgcgtggcgtacaacgtcggcgggcagatggccaccaacaaccagagctccaccactgcccccgcgaccggcacgtacaacctccaggaaatcgtgcccggcagcgtgtggatggagagggacgtgtacctccaaggacccatctgggccaagatcccagagacgggggcgcactttcacccctctccggccatgggcggattcggactcaaacacccaccgcccatgatgctcatcaagaacacgcctgtgcccggaaatatcaccagcttctcggacgtgcccgtcagcagcttcatcacccagtacagcaccgggcaggtcaccgtggagatggagtgggagctcaagaaggaaaactccaagaggtggaacccagagatccagtacacaaacaactacaacgacccccagtttgtggactttgccccggacagcaccggggaatacagaaccaccagacctatcggaacccgataccttacccgacccctttaacccattcatgtcgcataccctcaataaa

SEQ ID NO: 2168 - protein, 724 aa, Artificial Sequence
  Description of Artificial Sequence: Synthetic polypeptide
MSFVDHPPDWLEEVGEGLREFLGLEAGPPKPKPNQQHQDQARGLVLPGYNYLGPGNGLDRGEPVNRADEVAREHDISYNEQLEAGDNPYLKYNHADAEFQEKLADDTSFGGNLGKAVFQAKKRVLEPFGLVEEGAKTAPTGKRIDDHFPKRKKARTEEDSKPSTSSDAEAGPSGSQQLQIPAQPASSLGADTMSAGGGGPLGDNNQGADGVGNASGDWHCDSTWMGDRVVTKSTRTWVLPSYNNHQYREIKSGSVDGSNANAYFGYSTPWGYFDFNRFHSHWSPRDWQRLINNYWGFRPRSLRVKIFNIQVKEVTVQDSTTTIANNLTSTVQVFTDDDYQLPYVVGNGTEGCLPAFPPQVFTLPQYGYATLNRDNTENPTERSSFFCLEYFPSKMLRTGNNFEFTYNFEEVPFHSSFAPSQNLFKLANPLVDQYLYRFVSTNNTGGVQFNKNLAGRYANTYKNWFPGPMGRTQGWNLGSGVNRASVSAFATTNRMELEGASYQVPPQPNGMTNNLQGSNTYALENTMIFNSQSANPGTTATYLEGNMLITSESETQPVNRVAYNVGGQMATNNQSSTTAPATGTYNLQEIVPGSVWMERDVYLQGPIWAKIPETGAHFHPSPAMGGFGLKHPPPMMLIKNTPVPGNITSFSDVPVSSFITQYSTGQVTVEMEWELKKENSKRWNPEIQYTNNYNDPQFVDFAPDSTGEYRTTRPIGTRYLTRPL

SEQ ID NO: 2169 - DNA, 2203 bp, Artificial Sequence
  Description of Artificial Sequence: Synthetic polynucleotide
atgtcttttgttgatcaccctccagattggttggaagaagttggtgaaggtcttcgcgagtttttgggccttgaagcgggcccaccgaaaccaaaacccaatcagcagcatcaagatcaagcccgtggtcttgtgctgcctggttataactatctcggacccggaaacggtctcgatcgaggagagcctgtcaacagggcagacgaggtcgcgcgagagcacgacatctcgtacaacgagcagcttgaggcgggagacaacccctacctcaagtacaaccacgcggacgccgagtttcaggagaagctcgccgacgacacatccttcgggggaaacctcggaaaggcagtctttcaggccaagaaaagggttctcgaaccttttggcctggttgaagagggtgctaagacggcccctaccggaaagcggatagacgaccactttccaaaaagaaagaaggctcggaccgaagaggactccaagccttccacctcgtcagacgccgaagctggacccagcggatcccagcagctgcaaatcccagcccaaccagcctcaagtttgggagctgatacaatgtctgcgggaggtggcggcccattgggcgacaataaccaaggtgccgatggagtgggcaatgcctcgggagattggcattgcgattccacgtggatgggggacagagtcgtcaccaagtccacccgaacctgggtgctgcccagctacaacaaccaccagtaccgagagatcaaaagcggctccgtcgacggaagcaacgccaacgcctactttggatacagcaccccctgggggtactttgactttaaccgcttccacagccactggagcccccgagactggcaaagactcatcaacaactactggggcttcagaccccggtccctcagagtcaaaatcttcaacattcaagtcaaagaggtcacggtgcaggactccaccaccaccatcgccaacaacctcacctccaccgtccaagtgtttacggacgacgactaccagctgccctacgtcgtcggcaacgggaccgagggatgcctgccggccttccctccgcaggtctttacgctgccgcagtacggttacgcgacgctgaaccgcgacaacacagaaaatcccaccgagaggagcagcttcttctgcctagagtactttcccagcaagatgctgagaacgggcaacaactttgagtttacctacaactttgaggaggtgcccttccactccagcttcgctcccagtcagaacctgttcaagctggccaacccgctggtggaccagtacttgtaccgcttcgtgagcacaaataacactggcggagtccagttcaacaagaacctggccgggagatacgccaacacctacaaaaactggttcccggggcccatgggccgaacccagggctggaacctgggctccggggtcaaccgcgccagtgtcagcgccttcgccacgaccaataggatggagctcgagggcgcgagttaccaggtgcccccgcagccgaacggcatgaccaacaacctccagggcagcaacacctatgccctggagaacactatgatcttcaacagccagggggcgaacccgggcaccaccgccacgtacctcgagggcaacatgctcatcaccagcgagagcgagacgcagccggtgaaccgcgtggcgtacaacgtcggcgggcagatggccaccaacaaccagagctccaccactgcccccgcgaccggcacgtacaacctccaggaaatcgtgcccggcagcgtgtggatggagagggacgtgtacctccaaggacccatctgggccaagatcccagagacgggggcgcactttcacccctctccggccatgggcggattcggactcaaacacccaccgcccatgatgctcatcaagaacacgcctgtgcccggaaatatcaccagcttctcggacgtgcccgtcagcagcttcatcacccagtacagcaccgggcaggtcaccgtggagatggagtgggagctcaagaaggaaaactccaagaggtggaacccagagatccagtacacaaacaactacaacgacccccagtttgtggactttgccccggacagcaccggggaatacagaaccaccagacctatcggaacccgataccttacccgacccctttaacccattcatgtcgcataccctcaataaa

SEQ ID NO: 2170 - protein, 724 aa, Artificial Sequence
  Description of Artificial Sequence: Synthetic polypeptide
MSFVDHPPDWLEEVGEGLREFLGLEAGPPKPKPNQQHQDQARGLVLPGYNYLGPGNGLDRGEPVNRADEVAREHDISYNEQLEAGDNPYLKYNHADAEFQEKLADDTSFGGNLGKAVFQAKKRVLEPFGLVEEGAKTAPTGKRIDDHFPKRKKARTEEDSKPSTSSDAEAGPSGSQQLQIPAQPASSLGADTMSAGGGGPLGDNNQGADGVGNASGDWHCDSTWMGDRVVTKSTRTWVLPSYNNHQYREIKSGSVDGSNANAYFGYSTPWGYFDFNRFHSHWSPRDWQRLINNYWGFRPRSLRVKIFNIQVKEVTVQDSTTTIANNLTSTVQVFTDDDYQLPYVVGNGTEGCLPAFPPQVFTLPQYGYATLNRDNTENPTERSSFFCLEYFPSKMLRTGNNFEFTYNFEEVPFHSSFAPSQNLFKLANPLVDQYLYRFVSTNNTGGVQFNKNLAGRYANTYKNWFPGPMGRTQGWNLGSGVNRASVSAFATTNRMELEGASYQVPPQPNGMTNNLQGSNTYALENTMIFNSQGANPGTTATYLEGNMLITSESETQPVNRVAYNVGGQMATNNQSSTTAPATGTYNLQEIVPGSVWMERDVYLQGPIWAKIPETGAHFHPSPAMGGFGLKHPPPMMLIKNTPVPGNITSFSDVPVSSFITQYSTGQVTVEMEWELKKENSKRWNPEIQYTNNYNDPQFVDFAPDSTGEYRTTRPIGTRYLTRPL

SEQ ID NO: 2171 - DNA, 2194 bp, Artificial Sequence
  Description of Artificial Sequence: Synthetic polynucleotide
atgtcttttgttgatcaccctccagattggttggaagaagttggtgaaggtcttcgcgagtttttgggccttgaagcgggcccaccgaaaccaaaacccaatcagcagcatcaagatcaagcccgtggtcttgtgctgcctggttataactatctcggacccggaaacggtctcgatcgaggagagcctgtcaacagggcagacgaggtcgcgcgagagcacgacatctcgtacaacgagcagcttgaggcgggagacaacccctacctcaagtacaaccacgcggacgccgagtttcaggagaagctcgccgacgacacatccttcgggggaaacctcggaaaggcagtctttcaggccaagaaaagggttctcgaaccttttggcctggttgaagagggtgctaagacggcccctaccggaaagcggatagacgaccactttccaaaaagaaagaaggctcggaccgaagaggactccaagccttccacctcgtcagacgccgaagctggacccagcggatcccagcagctgcaaatcccagcccaaccagcctcaagtttgggagctgatacaatgtctgcgggaggtggcggcccattgggcgacaataaccaaggtgccgatggagtgggcaatgcctcgggagattggcattgcgattccacgtggatgggggacagagtcgtcaccaagtccacccgaacctgggtgctgcccagctacaacaaccaccagtaccgagagatcaaaagcggctccgtcgacggaagcaacgccaacgcctactttggatacagcaccccctgggggtactttgactttaaccgcttccacagccactggagcccccgagactggcaaagactcatcaacaactactggggcttcagaccccggtccctcagagtcaaaatcttcaacattcaagtcaaagaggtcacggtgcaggactccaccaccaccatcgccaacaacctcacctccaccgtccaagtgtttacggacgacgactaccagctgccctacgtcgtcggcaacgggaccgagggatgcctgccggccttccctccgcaggtctttacgctgccgcagtacggttacgcgacgctgaaccgcgacaacacagaaaatcccaccgagaggagcagcttcttctgcctagagtactttcccagcaagatgctgagaacgggcaacaactttgagtttacctacaactttgaggaggtgcccttccactccagcttcgctcccagtcagaacctgttcaagctggccaacccgctggtggaccagtacttgtaccgcttcgtgagcacaaataacactggcggagtccagttcaacaagaacctggccgggagatacgccaacacctacaaaaactggttcccggggcccatgggccgaacccagggctggaacctgggctccggggtcaaccgcgccagtgtcagcgccttcgccacgaccaataggatggagctcgagggcgcgagttaccaggtgcccccgcagccgaacggcatgaccaacaacctccagggcagcaacacctatgccctggagaacactatgatcttcgggaagcaaggctcagagaaaacaaatgtggacattgaaaaggtcatgatcaccagcgagagcgagacgcagccggtgaaccgcgtggcgtacaacgtcggcgggcagatggccaccaacaaccagagctccaccactgcccccgcgaccggcacgtacaacctccaggaaatcgtgcccggcagcgtgtggatggagagggacgtgtacctccaaggacccatctgggccaagatcccagagacgggggcgcactttcacccctctccggccatgggcggattcggactcaaacacccaccgcccatgatgctcatcaagaacacgcctgtgcccggaaatatcaccagcttctcggacgtgcccgtcagcagcttcatcacccagtacagcaccgggcaggtcaccgtggagatggagtgggagctcaagaaggaaaactccaagaggtggaacccagagatccagtacacaaacaactacaacgacccccagtttgtggactttgccccggacagcaccggggaatacagaaccaccagacctatcggaacccgataccttacccgacccctttaacccattcatgtcgcataccctcaataaa

SEQ ID NO: 2172 - protein, 721 aa, Artificial Sequence
  Description of Artificial Sequence: Synthetic polypeptide
MSFVDHPPDWLEEVGEGLREFLGLEAGPPKPKPNQQHQDQARGLVLPGYNYLGPGNGLDRGEPVNRADEVAREHDISYNEQLEAGDNPYLKYNHADAEFQEKLADDTSFGGNLGKAVFQAKKRVLEPFGLVEEGAKTAPTGKRIDDHFPKRKKARTEEDSKPSTSSDAEAGPSGSQQLQIPAQPASSLGADTMSAGGGGPLGDNNQGADGVGNASGDWHCDSTWMGDRVVTKSTRTWVLPSYNNHQYREIKSGSVDGSNANAYFGYSTPWGYFDFNRFHSHWSPRDWQRLINNYWGFRPRSLRVKIFNIQVKEVTVQDSTTTIANNLTSTVQVFTDDDYQLPYVVGNGTEGCLPAFPPQVFTLPQYGYATLNRDNTENPTERSSFFCLEYFPSKMLRTGNNFEFTYNFEEVPFHSSFAPSQNLFKLANPLVDQYLYRFVSTNNTGGVQFNKNLAGRYANTYKNWFPGPMGRTQGWNLGSGVNRASVSAFATTNRMELEGASYQVPPQPNGMTNNLQGSNTYALENTMIFGKQGSEKTNVDIEKVMITSESETQPVNRVAYNVGGQMATNNQSSTTAPATGTYNLQEIVPGSVWMERDVYLQGPIWAKIPETGAHFHPSPAMGGFGLKHPPPMMLIKNTPVPGNITSFSDVPVSSFITQYSTGQVTVEMEWELKKENSKRWNPEIQYTNNYNDPQFVDFAPDSTGEYRTTRPIGTRYLTRPL

SEQ ID NO: 2173 - protein, 519 aa, Artificial Sequence
  Description of Artificial Sequence: Synthetic polypeptide
DGVGSSSGNWHCDSTWLGDRVITTSTRTWALPTYNNHLYKQISNGTSGGATNDNTYFGYSTPWGYFDFNRFHCHFSPRDWQRLINNNWGFRPKRLSFKLFNIQVKEVTQNEGTKTIANNLTSTIQVFTDSEYQLPYVLGSAHQGCLPPFPADVFMIPQYGYLTLNNGSQAVGRSSFYCLEYFPSQMLRTGNNFQFTYTFEDVPFHSSYAHSQSLDRLMNPLIDQYLYYLSRTQTTGGTANTQTLGFSQGGPNTMANQAKNWLPGPCYRQQRVSTTTGQNNNSNFAWTAGTKYHLNGRNSLANPGIAMATHKDDEERFFPSNGILIFGKQNAARDNADYSDVMLTSEEEIKTTNPVATEEYGIVADNLQQQNTAPQIGTVNSQGALPGMVWQNRDVYLQGPIWAKIPHTDGNFHPSPLMGGFGLKHPPPQILIKNTPVPADPPTTFNQSKLNSFITQYSTGQVSVEIEWELQKENSKRWNPEIQYTSNYYKSTSVDFAVNTEGVYSEPRPIGTRYLTRNL

SEQ ID NO: 2174 - protein, 738 aa, Artificial Sequence
  Description of Artificial Sequence: Synthetic polypeptide
MAADGYLPDWLEDNLSEGIREWWALQPGAPKPKANQQHQDNARGLVLPGYKYLGPGNGLDKGEPVNAADAAALEHDKAYDQQLKAGDNPYLKYNHADAEFQERLKEDTSFGGNLGRAVFQAKKRLLEPLGLVEEAAKTAPGKKRPVEPSPQRSPDSSTGIGKKGQQPARKRLNFGQTGDSESVPDPQPLGEPPAAPSGVGPNTMAAGGGAPMADNNEGADGVGSSSGNWHCDSTWLGDRVITTSTRTWALPTYNNHLYKQISNGTSGGATNDNTYFGYSTPWGYFDFNRFHCHFSPRDWQRLINNNWGFRPKRLSFKLFNIQVKEVTQNEGTKTIANNLTSTIQVFTDSEYQLPYVLGSAHQGCLPPFPADVFMIPQYGYLTLNNGSQAVGRSSFYCLEYFPSQMLRTGNNFQFTYTFEDVPFHSSYAHSQSLDRLMNPLIDQYLYYLSRTQTTGGTANTQTLGFSQGGPNTMANQAKNWLPGPCYRQQRVSTTTGQNNNSNFAWTAGTKYHLNGRNSLANPGIAMATHKDDEERFFPSNGILIFGKQNAARDNADYSDVMLTSEEEIKTTNPVATEEYGIVADNLQQQNTAPQIGTVNSQGALPGMVWQNRDVYLQGPIWAKIPHTDGNFHPSPLMGGFGLKHPPPQILIKNTPVPADPPTTFNQSKLNSFITQYSTGQVSVEIEWELQKENSKRWNPEIQYTSNYYKSTSVDFAVNTEGVYSEPRPIGTRYLTRNL

SEQ ID NO: 2175 - protein, 725 aa, Artificial Sequence
  Description of Artificial Sequence: Synthetic polypeptide
MAADGYLPDWLEDNLSEGIREWWALQPGAPKPKANQQHQDNARGLVLPGYKYLGPGNGLDKGEPVNAADAAALEHDKAYDQQLKAGDNPYLKYNHADAEFQERLKEDTSFGGNLGRAVFQAKKRLLEPLGLVEEAAKTAPTGKRIDDHFPKRKKARTEEDSKPSTSSDAEAGPSGSQQLQIPAQPASSLGADTMSAGGGGPLGDNNQGADGVGNASGDWHCDSTWMGDRVVTKSTRTWVLPSYNNHQYREIKSGSVDGSNANAYFGYSTPWGYFDFNRFHSHWSPRDWQRLINNYWGFRPRSLRVKIFNIQVKEVTVQDSTTTIANNLTSTVQVFTDDDYQLPYVVGNGTEGCLPAFPPQVFTLPQYGYATLNRDNTENPTERSSFFCLEYFPSKMLRTGNNFEFTYNFEEVPFHSSFAPSQNLFKLANPLVDQYLYRFVSTNNTGGVQFNKNLAGRYANTYKNWFPGPMGRTQGWNLGSGVNRASVSAFATTNRMELEGASYQVPPQPNGMTNNLQGSNTYALENTMIFNSQPANPGTTATYLEGNMLITSESETQPVNRVAYNVGGQMATNNQSSTTAPATGTYNLQEIVPGSVWMERDVYLQGPIWAKIPETGAHFHPSPAMGGFGLKHPPPMMLIKNTPVPGNITSFSDVPVSSFITQYSTGQVTVEMEWELKKENSKRWNPEIQYTNNYNDPQFVDFAPDSTGEYRTTRPIGTRYLTRPL

SEQ ID NO: 2176 - protein, 736 aa, Artificial Sequence
  Description of Artificial Sequence: Synthetic polypeptide
MAADGYLPDWLEDNLSEGIREWWALKPGAPKPKANQQKQDDGRGLVLPGYKYLGPFNGLDKGEPVNAADAAALEHDKAYDQQLQAGDNPYLRYNHADAEFQERLQEDTSFGGNLGRAVFQAKKRVLEPLGLVEEGAKTAPGKKRPVDQSPQEPDSSSGVGKSGKQPARKRLNFGQTGDSESVPDPQPLGEPPAAPTSLGSNTMASGGGAPMADNNEGADGVGNSSGNWHCDSQWLGDRVITTSTRTWALPTYNNHLYKQISSQSGASNDNHYFGYSTPWGYFDFNRFHCHFSPRDWQRLINNNWGFRPKKLSFKLFNIQVKEVTQNDGTTTIANNLTSTVQVFTDSEYQLPYVLGSAHQGCLPPFPADVFMVPQYGYLTLNNGSQAVGRSSFYCLEYFPSQMLRTGNNFQFSYTFEDVPFHSSYAHSQSLDRLMNPLIDQYLYYLNRTQGTTSGTTNQSRLLFSQAGPQSMSLQARNWLPGPCYRQQRLSKTANDNNNSNFPWTAASKYHLNGRDSLVNPGPAMASHKDDEEKFFPMHGNLIFGKEGTTASNAELDNVMITDEEEIRTTNPVATEQYGTVANNLQSSNTAPTTRTVNDQGALPGMVWQDRDVYLQGPIWAKIPHTDGHFHPSPLMGGFGLKHPPPQIMIKNTPVPANPPTTFSPAKFASFITQYSTGQVSVEIEWELQKENSKRWNPEIQYTSNYNKSVNVDFTVDTNGVYSEPRPIGTRYLTRNL

SEQ ID NO: 2177 - protein, 735 aa, Artificial Sequence
  Description of Artificial Sequence: Synthetic polypeptide
MSFVDHPPDWLEEVGEGLREFLGLEAGPPKPKPNQQHQDQARGLVLPGYNYLGPGNGLDRGEPVNRADEVAREHDISYNEQLEAGDNPYLKYNHADAEFQEKLADDTSFGGNLGKAVFQAKKRVLEPFGLVEEGAKTAPGKKRPVDQSPQEPDSSSGVGKSGKQPARKRLNFGQTGDSESVPDPQPLGEPPAAPTSLGSNTMASGGGAPMADNNEGADGVGNSSGNWHCDSQWLGDRVITTSTRTWALPTYNNHLYKQISSQSGASNDNHYFGYSTPWGYFDFNRFHCHFSPRDWQRLINNNWGFRPKKLSFKLFNIQVKEVTQNDGTTTIANNLTSTVQVFTDSEYQLPYVLGSAHQGCLPPFPADVFMVPQYGYLTLNNGSQAVGRSSFYCLEYFPSQMLRTGNNFQFSYTFEDVPFHSSYAHSQSLDRLMNPLIDQYLYYLNRTQGTTSGTTNQSRLLFSQAGPQSMSLQARNWLPGPCYRQQRLSKTANDNNNSNFPWTAASKYHLNGRDSLVNPGPAMASHKDDEEKFFPMHGNLIFGKEGTTASNAELDNVMITDEEEIRTTNPVATEQYGTVANNLQSSNTAPTTRTVNDQGALPGMVWQDRDVYLQGPIWAKIPHTDGHFHPSPLMGGFGLKHPPPQIMIKNTPVPANPPTTFSPAKFASFITQYSTGQVSVEIEWELQKENSKRWNPEIQYTSNYNKSVNVDFTVDTNGVYSEPRPIGTRYLTRPL

SEQ ID NO: 2178 - protein, 736 aa, Artificial Sequence
  Description of Artificial Sequence: Synthetic polypeptide
MAADGYLPDWLEDNLSEGIREWWALKPGAPKPKANQQKQDDGRGLVLPGYKYLGPFNGLDKGEPVNAADAAALEHDKAYDQQLQAGDNPYLRYNHADAEFQERLQEDTSFGGNLGRAVFQAKKRVLEPLGLVEEGAKTAPGKKRPVEPSPQRSPDSSTGIGKKGQQPARKRLNFGQTGDSESVPDPQPLGEPPAAPSGVGPNTMAAGGGAPMADNNEGADGVGSSSGNWHCDSTWLGDRVITTSTRTWALPTYNNHLYKQISSQSGASNDNHYFGYSTPWGYFDFNRFHCHFSPRDWQRLINNNWGFRPKRLSFKLFNIQVKEVTQNEGTKTIANNLTSTIQVFTDSEYQLPYVLGSAHQGCLPPFPADVFMIPQYGYLTLNNGSQAVGRSSFYCLEYFPSQMLRTGNNFQFTYTFEDVPFHSSYAHSQSLDRLMNPLIDQYLYYLSRTQTTGGTANTQTLGFSQGGPNTMANQAKNWLPGPCYRQQRVSTTTGQNNNSNFAWTAGTKYHLNGRNSLANPGIAMATHKDDEERFFPSNGILIFGKQGTTASNAELDNVMITDEEEIKTTNPVATEEYGIVADNLQQQNTAPQIGTVNSQGALPGMVWQNRDVYLQGPIWAKIPHTDGNFHPSPLMGGFGLKHPPPQILIKNTPVPADPPTTFNQSKLNSFITQYSTGQVSVEIEWELQKENSKRWNPEIQYTSNYNKSVNVDFTVDTNGVYSEPRPIGTRYLTRNL

SEQ ID NO: 2179 - protein, 736 aa, Artificial Sequence
  Description of Artificial Sequence: Synthetic polypeptide
MAADGYLPDWLEDNLSEGIREWWALKPGAPKPKANQQKQDDGRGLVLPGYKYLGPFNGLDKGEPVNAADAAALEHDKAYDQQLQAGDNPYLRYNHADAEFQERLQEDTSFGGNLGRAVFQAKKRVLEPLGLVEEGAKTAPGKKRPVEPSPQRSPDSSTGIGKKGQQPARKRLNFGQTGDSESVPDPQPLGEPPAAPSGVGPNTMAAGGGAPMADNNEGADGVGSSSGNWHCDSTWLGDRVITTSTRTWALPTYNNHLYKQISSQSGASNDNHYFGYSTPWGYFDFNRFHCHFSPRDWQRLINNNWGFRPKRLSFKLFNIQVKEVTQNEGTKTIANNLTSTIQVFTDSEYQLPYVLGSAHQGCLPPFPADVFMIPQYGYLTLNNGSQAVGRSSFYCLEYFPSQMLRTGNNFQFTYTFEDVPFHSSYAHSQSLDRLMNPLIDQYLYYLSRTQTTGGTANTQTLGFSQGGPNTMANQAKNWLPGPCYRQQRVSTTTGQNNNSNFAWTAGTKYHLNGRNSLANPGIAMATHKDDEERFFPSNGILIFGKQNAARDNADYSDVMLTSEEEIKTTNPVATEEYGIVADNLQQQNTAPQIGTVNSQGALPGMVWQNRDVYLQGPIWAKIPHTDGNFHPSPLMGGFGLKHPPPQILIKNTPVPADPPTTFNQSKLNSFITQYSTGQVSVEIEWELQKENSKRWNPEIQYTSNYYKSTSVDFAVNTEGVYSEPRPIGTRYLTRNL

SEQ ID NO: 2180 - protein, 736 aa, Artificial Sequence
  Description of Artificial Sequence: Synthetic polypeptide
MAADGYLPDWLEDNLSEGIREWWDLKPGAPKPKANQQKQDDGRGLVLPGYKYLGPFNGLDKGEPVNAADAAALEHDKAYDQQLKAGDNPYLRYNHADAEFQERLQEDTSFGGNLGRAVFQAKKRVLEPLGLVEEGAKTAPGKKRPVEQSPQEPDSSSGIGKTGQQPAKKRLNFGQTGDTESVPDPQPLGEPPAAPSGLGPNTMASGGGAPMADNNEGADGVGNSSGNWHCDSTWLGDRVITTSTRTWALPTYNNHLYKQISNGTSGGSTNDNTYFGYSTPWGYFDFNRFHCHFSPRDWQRLINNNWGFRPKRLNFKLFNIQVKEVTTNEGTKTIANNLTSTVQVFTDSEYQLPYVLGSAHQGCLPPFPADVFMVPQYGYLTLNNGSQALGRSSFYCLEYFPSQMLRTGNNFQFSYTFEDVPFHSSYAHSQSLDRLMNPLIDQYLYYLVRTQTTGTGGTQTLAFSQAGPSSMASQARNWVPGPSYRQQRVSTTTNQNNNSNFAWTGAAKFKLNGRDSLMNPGVAMASHKDDEDRFFPSSGVLIFGKQGAGNDGVDYSQVLITDEEEIKATNPVATEEYGAVAINNQAANTQAQTGLVHNQGVIPGMVWQNRDVYLQGPIWAKIPHTDGNFHPSPLMGGFGLKHPPPQILIKNTPVPADPPLTFNQAKLNSFITQYSTGQVSVEIEWELQKENSKRWNPEIQYTSNYYKSTNVDFAVNTEGVYSEPRPIGTRYLTRNL

SEQ ID NO: 2181 - DNA, 3695 bp, Artificial Sequence
  Description of Artificial Sequence: Synthetic polynucleotide
ctctttgcgcttgcgttttcccttgtccagatagcccagtagctgacattcatccggggtcagcaccgtttctgcggactggctttctacgtgaaaaggatctaggtgaagatcctttttgataatctcatgcctgacatttatattccccagaacatcaggttaatggcgtttttgatgtcattttcgcggtggctgagatcagccacttcttccccgataacggagaccggcacactggccatatcggtggtcatcatgcgccagctttcatccccgatatgcaccaccgggtaaagttcacgggagactttatctgacagcagacgtgcactggccagggggatcaccatccgtcgccccggcgtgtcaataatatcactctgtacatccacaaacagacgataacggctctctcttttataggtgtaaaccttaaactgccgtacgtataggctgcgcaactgttgggaagggcgatcggtgcgggcctcttcgctattacgccagctggcgaaagggggatgtgctgcaaggcgattaagttgggtaacgccagggttttcccagtcacgacgttgtaaaacgacggccagtgaattgtaatacgactcactatagggcgaattgaatttagcggccgcgaattcgcccttatgatatctggtgggaggagggcaagatgacggccaaggtcgtggagtccgccaaggccattctcggcggcagcaaagtgcgcgtggaccaaaagtgcaagtcgtccgcccagatcgatcccactcccgtcattgtcacctccaacaccaacatgtgcgccgtgattgacgggaacagcaccaccttcgagcaccagcagccgttgcaggaccggatgttcaaatttgaacttacccgccgtctggagcatgactttggcaaggtgacaaagcaggaagtcaaagagttcttccgctgggcgcaggatcacgtgaccgaggtggcgcatgagttccacgtcagaaagggtggagccaacaagagacccgcccccgatgacgctgataaaagcgagcccaagcgggcctgcccctcagtcgcagatccatcgacgtcagacgcggaaggagctccggtggactttgccgacaggtaccaaaacaaatgttctcgtcacgcgggcatgcttcagatgctgtttccctgcaagacatgcgagagaatgaatcagaatttcaacatttgcttcacgcacgggaccagggactgttcggagtgcttccccggcgtgtcagaatctcaaccggtcgtcagaaaaaggacgtatcggaaactctgtgccattcatcatctgctggggagggctcccgagattgcttgctcggcctgcgatctggtcaacgtggacctggatgactgtgtctctgagcaataaatgacttaaaccaggtatggctgccgatggttatcttccagattggctcgaggacaacctctctgagggcattcgcgagtggtgggacttgaaacctggagccccgaaacccaaagccaaccagcaaaagcaggacgacggccggggtctggtgcttcctggctacaagtacctcggacccttcaacggactcgacaagggggagcccgtcaacgcggcggacgcagcggccctcgagcacgacaaggcctacgaccagcagctcaaagcgggtgacaatccgtacctgcggtataaccacgccgacgccgagtttcaggagcgtctgcaagaagatacgtcttttgggggcaacctcgggcgagcagtcttccaggccaagaagcgggttctcgaacctctcggtctggttgaggaaggcgctaagacggctcctggaaagaagagaccggtagagcagtcaccccaagaaccagactcctcatcgggcatcggcaagacaggccagcagcccgctaaaaagagactcaattttggtcagactggcgacacagagtcagtccccgacccacaacctctcggagaacctccagcagccccctcaggtctgggacctaatacaatggcttcaggcggtggcgctccaatggcagacaataacgaaggcgccgacggagtgggtaattcctcgggaaattggcattgcgattccacatggctgggggacagagtcatcaccaccagcacccgaacctgggccctgcccacctacaacaaccacctctacaagcaaatctccaacggcacctcgggaggaagcaccaacgacaacacctactttggctacagcaccccctgggggtattttgacttcaacagattccactgccacttttcaccacgtgactggcagcgactcatcaacaacaattggggattccggcccaagagactcaacttcaagctcttcaacatccaggtcaaggaagtcacgacgaacgaaggcaccaagaccatcgccaataatctcaccagcaccgtgcaggtctttacggactcggagtaccagctaccgtacgtgctaggatcagctcaccagggatgtctgcctccgttcccggcggacgtcttcatggttcctcagtacggttatctaactctgaacaatggcagccaggccctgggacgttcctccttctactgcctggagtatttcccatcgcagatgctgagaaccggcaacaactttcagttcagctacaccttcgaggacgtgcctttccacagcagctacgcgcacagccaaagcctggacaggctgatgaatcccctcatcgaccagtacctgtattacctggtcagaacgcagacaaccgggactggagggacgcagactctggcattcagccaagcaggccctagctcaatggccagccaggctagaaactgggtgcccggaccgagctaccggcagcagcgcgtctccacgacaaccaaccagaacaacaacagcaactttgcctggacgggagctgccaaatttaaactgaacggccgagactctctaatgaaccccggcgtggccatggcttcacacaaggatgacgaggaccgcttcttcccttctagcggggtcctgattttcggcaagcaaggagccgggaatgatggagtggattacagccaagtgctgattacagatgaggaagaaatcaaggctaccaaccccgtggcaacagaggaatatggagcagtggccatcaacaaccaggccgctaatacgcaggcgcagaccggactcgtgcacaaccagggggtgattcccggcatggtgtggcagaacagagacgtgtacctgcagggtcccatctgggccaaaattcctcacacggacggcaactttcacccgtctcccctgatgggcggctttggactgaagcacccgcctcctcaaattctcatcaagaacacaccggttccagcggacccgccgcttaccttcaaccaggccaagctgaactctttcatcacgcagtacagcaccggacaggtcagcgtggaaatcgagtgggagctgcagaaagaaaacagcaaacgctggaatccagagattcagtacacttccaactactacaaatctacaaatgtggactttgctgtcaacacggaaggagtgtatagcgagcctcgccccattggcacccgttacctcacccgcaacctgtaattgcctgttaatcaataaaccggttaattcgtttcagtaaggaagaattcgtttaaa

SEQ ID NO: 2182 - protein, 736 aa, Artificial Sequence; identical to SEQ ID NO: 507
  Description of Artificial Sequence: Synthetic polypeptide

SEQ ID NO: 2183 - protein, 736 aa, Artificial Sequence
  Description of Artificial Sequence: Synthetic polypeptide
MAADGYLPDWLEDNLSEGIREWWDLKPGAPKPKANQQKQDDGRGLVLPGYKYLGPFNGLDKGEPVNAADAAALEHDKAYDQQLKAGDNPYLRYNHADAEFQERLQEDTSFGGNLGRAVFQAKKRVLEPLGLVEEGAKTAPGKKRPVEQSPQEPDSSSGIGKTGQQPAKKRLNFGQTGDTESVPDPQPLGEPPAAPSGLGPNTMASGGGAPMADNNEGADGVGNSSGNWHCDSTWLGDRVITTSTRTWALPTYNNHLYKQISNGTSGGSTNDNTYFGYSTPWGYFDFNRFHCHFSPRDWQRLINNNWGFRPKRLNFKLFNIQVKEVTTNEGTKTIANNLTSTVQVFTDSEYQLPYVLGSAHQGCLPPFPADVFMVPQYGYLTLNNGSQALGRSSFYCLEYFPSQMLRTGNNFQFSYTFEDVPFHSSYAHSQSLDRLMNPLIDQYLYYLVRTQTTGTGGTQTLAFSQAGPSNMASQARNWVPGPSYRQQRVSTTTNQNNNSNFAWTGAAKFKLNGRDSLMNPGVAMASHKDDEDRFFPSSGVLIFGKQGAGNDGVDYSQVLITDEEEIKATNPVATEEYGAVAINNQAANTQAQTGLVHNQGVIPGMVWQNRDVYLQGPIWAKIPHTDGNFHPSPLMGGFGLKHPPPQILIKNTPVPADPPLTFNQAKLNSFITQYSTGQVSVEIEWELQKENSKRWNPEIQYTSNYYKSTNVDFAVNTEGVYSEPRPIGTRYLTRNL

SEQ ID NO: 2184 - protein, 738 aa, Artificial Sequence; identical to SEQ ID NO: 1878
  Description of Artificial Sequence: Synthetic polypeptide

SEQ ID NO: 2185 - protein, 736 aa, Artificial Sequence
  Description of Artificial Sequence: Synthetic polypeptide
MAADGYLPDWLEDNLSEGIREWWALQPGAPKPKANQQHQDNARGLVLPGYKYLGPGNGLDKGEPVNAADAAALEHDKAYDQQLKAGDNPYLKYNHADAEFQERLKEDTSFGGNLGRAVFQAKKRILEPLGLVEEAAKTAPGKKRPVDQSPQEPDSSSGVGKSGKQPARKRLNFGQTGDSESVPDPQPLGEPPAAPTSLGSNTMASGGGAPMADNNEGADGVGNSSGNWHCDSQWLGDRVITTSTRTWALPTYNNHLYKQISSQSGASNDNHYFGYSTPWGYFDFNRFHCHFSPRDWQRLINNNWGFRPKKLSFKLFNIQVKEVTQNDGTTTIANNLTSTVQVFTDSEYQLPYVLGSAHQGCLPPFPADVFMVPQYGYLTLNNGSQAVGRSSFYCLEYFPSQMLRTGNNFQFSYTFEDVPFHSSYAHSQSLDRLMNPLIDQYLYYLNRTQGTTSGTTNQSRLLFSQAGPQSMSLQARNWLPGPCYRQQRLSKTANDNNNSNFPWTAASKYHLNGRDSLVNPGPAMASHKDDEEKFFPMHGNLIFGKEGTTASNAELDNVMITDEEEIRTTNPVATEQYGTVANNLQSSNTAPTTRTVNDQGALPGMVWQDRDVYLQGPIWAKIPHTDGHFHPSPLMGGFGLKHPPPQIMIKNTPVPANPPTTFSPAKFASFITQYSTGQVSVEIEWELQKENSKRWNPEIQYTSNYNKSVNVDFTVDTNGVYSEPRPIGTRYLTRPL

SEQ ID NO: 2186 - protein, 736 aa, Artificial Sequence
  Description of Artificial Sequence: Synthetic polypeptide
MAADGYLPDWLEDNLSEGIREWWALQPGAPKPKANQQHQDNARGLVLPGYKYLGPGNGLDKGEPVNAADAAALEHDKAYDQQLKAGDNPYLKYNHADAEFQERLKEDTSFGGNLGRAVFQAKKRLLEPLGLVEEAAKTAPGKKRPVDQSPQEPDSSSGVGKSGKQPARKRLNFGQTGDSESVPDPQPLGEPPAAPTSLGSNTMASGGGAPMADNNEGADGVGNSSGNWHCDSQWLGDRVITTSTRTWALPTYNNHLYKQISSQSGASNDNHYFGYSTPWGYFDFNRFHCHFSPRDWQRLINNNWGFRPKKLSFKLFNIQVKEVTQNDGTTTIANNLTSTVQVFTDSEYQLPYVLGSAHQGCLPPFPADVFMVPQYGYLTLNNGSQAVGRSSFYCLEYFPSQMLRTGNNFQFSYTFEDVPFHSSYAHSQSLDRLMNPLIDQYLYYLNRTQGTTSGTTNQSRLLFSQAGPQSMSLQARNWLPGPCYRQQRLSKVANDNNNSNFPWTAASKYHLNGRDSLVNPGPAMASHKDDEEKFFPMHGNLIFGKEGTTASNAELDNVMITDEEEIRTTNPVATEQYGTVANNLQSSNTAPTTRTVNDQGALPGMVWQDRDVYLQGPIWAKIPHTDGHFHPSPLMGGFGLKHPPPQIMIKNTPVPANPPTTFVPAKFASFITQYSTGQVSVEIEWELQKENSKRWNPEIQYTSNYNKSVNVDFTVDTNGVYSEPRPIGTRYLTRPL

SEQ ID NO: 2187 - protein, 736 aa, Artificial Sequence
  Description of Artificial Sequence: Synthetic polypeptide
  MOD_RES (168)..(168): Xaa can be any naturally occurring amino acid
  MOD_RES (204)..(204): Xaa can be any naturally occurring amino acid
  MOD_RES (266)..(266): Xaa can be any naturally occurring amino acid
  MOD_RES (311)..(311): Xaa can be any naturally occurring amino acid
  MOD_RES (411)..(411): Xaa can be any naturally occurring amino acid
  MOD_RES (460)..(460): Xaa can be any naturally occurring amino acid
  MOD_RES (493)..(493): Xaa can be any naturally occurring amino acid
  MOD_RES (562)..(562): Xaa can be any naturally occurring amino acid
  MOD_RES (576)..(576): Xaa can be any naturally occurring amino acid
  MOD_RES (587)..(587): Xaa can be any naturally occurring amino acid
  MOD_RES (609)..(609): Xaa can be any naturally occurring amino acid
MAADGYLPDWLEDNLSEGIREWWDLKPGAPKPKANQQKQDDGRGLVLPGYKYLGPFNGLDKGEPVNAADAAALEHDKAYDQQLKAGDNPYLRYNHADAEFQERLQEDTSFGGNLGRAVFQAKKRVLEPLGLVEEGAKTAPGKKRPVEQSPQEPDSSSGIGKKGQQPAXKRLNFGQTGDSESVPDPQPLGEPPAAPSGVGSNTMXAGGGAPMADNNEGADGVGNASGNWHCDSTWLGDRVITTSTRTWALPTYNNHLYKQISSQSGXSTNDNTYFGYSTPWGYFDFNRFHCHFSPRDWQRLINNNWGFRPKXLNFKLFNIQVKEVTTNDGTTTIANNLTSTVQVFTDSEYQLPYVLGSAHQGCLPPFPADVFMIPQYGYLTLNNGSQAVGRSSFYCLEYFPSQMLRTGNNFXFSYTFEDVPFHSSYAHSQSLDRLMNPLIDQYLYYLSRTQTTSGTAGNRXLQFSQAGPSSMANQAKNWLPGPCYRQQRVSKTXNQNNNSNFAWTGATKYHLNGRDSLVNPGPAMATHKDDEDKFFPMSGVLIFGKQGAGNSNVDLDNVMITXEEEIKTTNPVATEXYGTVATNLQSXNTAPATGTVNSQGALPGMVWQXRDVYLQGPIWAKIPHTDGHFHPSPLMGGFGLKHPPPQILIKNTPVPANPPTTFSPAKFASFITQYSTGQVSVEIEWELQKENSKRWNPEIQYTSNYNKSTNVDFAVDTNGVYSEPRPIGTRYLTRNL

SEQ ID NO: 2188 - DNA, 2208 bp, Artificial Sequence
  Description of Artificial Sequence: Synthetic polynucleotide
  misc_feature (502)..(504): n is a, c, g, or t
  misc_feature (610)..(612): n is a, c, g, or t
  misc_feature (796)..(798): n is a, c, g, or t
  misc_feature (931)..(933): n is a, c, g, or t
  misc_feature (1231)..(1233): n is a, c, g, or t
  misc_feature (1378)..(1380): n is a, c, g, or t
  misc_feature (1477)..(1479): n is a, c, g, or t
  misc_feature (1684)..(1686): n is a, c, g, or t
  misc_feature (1726)..(1728): n is a, c, g, or t
  misc_feature (1759)..(1761): n is a, c, g, or t
  misc_feature (1825)..(1827): n is a, c, g, or t
atggctgccgatggttatcttccagattggctcgaggacaacctctctgagggcattcgcgagtggtgggacttgaaacctggagccccgaaacccaaagccaaccagcaaaagcaggacgacggccggggtctggtgcttcctggctacaagtacctcggacccttcaacggactcgacaagggggagcccgtcaacgcggcggacgcagcggccctcgagcacgacaaggcctacgaccagcagctcaaagcgggtgacaatccgtacctgcggtataaccacgccgacgccgagtttcaggagcgtctgcaagaagatacgtcttttgggggcaacctcgggcgagcagtcttccaggccaagaagcgggttctcgaacctctcggtctggttgaggaaggcgctaagacggctcctggaaagaagagaccggtagagcaatcaccccaggaaccagactcctcttcgggcatcggcaagaaaggccagcagcccgcgnnnaagagactcaactttgggcagacaggcgactcagagtcagtgcccgaccctcaaccactcggagaaccccccgcagccccctctggtgtgggatctaatacaatgnnngcaggcggtggcgctccaatggcagacaataacgaaggcgccgacggagtgggtaacgcctcaggaaattggcattgcgattccacatggctgggcgacagagtcatcaccaccagcacccgaacctgggccctccccacctacaacaaccacctctacaagcaaatctccagccaatcgggannnagcaccaacgacaacacctacttcggctacagcaccccctgggggtattttgactttaacagattccactgccacttctcaccacgtgactggcagcgactcatcaacaacaactggggattccggcccaagnnnctcaacttcaagctcttcaacatccaggtcaaggaggtcacgacgaatgatggcaccacgaccatcgccaataaccttaccagcacggttcaggtctttacggactcggaataccagctcccgtacgtcctcggctctgcgcaccagggctgcctgcctccgttcccggcggacgtcttcatgattcctcagtacgggtacctgactctgaacaatggcagtcaggccgtgggccgttcctccttctactgcctggagtactttccttctcaaatgctgagaacgggcaacaactttnnnttcagctacacgtttgaggacgtgccttttcacagcagctacgcgcacagccaaagcctggaccggctgatgaaccccctcatcgaccagtacctgtactacctgtctcggactcagaccacgagtggtaccgcaggaaatcggnnnttgcaattttctcaggccgggcctagtagcatggcgaatcaggccaaaaactggctacccgggccctgctaccggcagcaacgcgtctccaagacannnaatcaaaataacaacagcaactttgcctggaccggtgccaccaagtatcatctgaatggcagagactctctggtaaatcccggtcccgctatggcaacccacaaggacgacgaagacaaattttttccgatgagcggagtcttaatatttgggaaacagggagctggaaatagcaacgtggaccttgacaacgttatgataaccnnngaggaagaaattaaaaccaccaacccagtggccacagaannntacggcacggtggccactaacctgcaatcgnnnaacaccgctcctgctacagggaccgtcaacagtcaaggagccttacctggcatggtctggcagnnncgggacgtgtacctgcagggtcctatctgggccaagattcctcacacggacggacactttcatccctcgccgctgatgggaggctttggactgaaacacccgcctcctcagatcctgattaagaatacacctgttcccgcgaatcctccaactaccttcagtccagctaagtttgcgtcgttcatcacgcagtacagcaccggacaggtcagcgtggaaattgaatgggagctgcagaaagaaaacagcaaacgctggaacccagagattcaatacacttccaactacaacaaatctacaaatgtggactttgctgttgacacaaatggcgtttattctgagcctcgccccatcggcacccgttacctcacccgtaatctg

SEQ ID NO: 2189 - protein, 737 aa, Artificial Sequence
  Description of Artificial Sequence: Synthetic polypeptide
  MOD_RES (157)..(157): Xaa can be any naturally occurring amino acid
  MOD_RES (168)..(168): Xaa can be any naturally occurring amino acid
  MOD_RES (262)..(263): Xaa can be any naturally occurring amino acid
  MOD_RES (312)..(312): Xaa can be any naturally occurring amino acid
  MOD_RES (412)..(412): Xaa can be any naturally occurring amino acid
  MOD_RES (460)..(461): Xaa can be any naturally occurring amino acid
  MOD_RES (552)..(552): Xaa can be any naturally occurring amino acid
  MOD_RES (556)..(557): Xaa can be any naturally occurring amino acid
  MOD_RES (563)..(563): Xaa can be any naturally occurring amino acid
  MOD_RES (580)..(580): Xaa can be any naturally occurring amino acid
  MOD_RES (588)..(588): Xaa can be any naturally occurring amino acid
  MOD_RES (664)..(664): Xaa can be any naturally occurring amino acid
MAADGYLPDWLEDNLSEGIREWWDLKPGAPKPKANQQKQDDGRGLVLPGYKYLGPFNGLDKGEPVNAADAAALEHDKAYDQQLKAGDNPYLRYNHADAEFQERLQEDTSFGGNLGRAVFQAKKRVLEPLGLVEEGAKTAPGKKRPVEQSPQEPDSSXGIGKKGQQPAXKRLNFGQTGDSESVPDPQPLGEPPAAPSGVGSNTMAAGGGAPMADNNEGADGVGNASGNWHCDSTWLGDRVITTSTRTWALPTYNNHLYKQISXXQSGGSTNDNTYFGYSTPWGYFDFNRFHCHFSPRDWQRLINNNWGFRPKXLNFKLFNIQVKEVTTNDGTTTIANNLTSTVQVFTDSEYQLPYVLGSAHQGCLPPFPADVFMIPQYGYLTLNNGSQAVGRSSFYCLEYFPSQMLRTGNNFXFSYTFEDVPFHSSYAHSQSLDRLMNPLIDQYLYYLSRTQTTGGTAGNXXLQFSQAGPSSMANQAKNWLPGPCYRQQRVSKTTNQNNNSNFAWTGATKYHLNGRDSLVNPGVAMATHKDDEDRFFPSSGVLIFGKQGAGNXNVDXXNVMITXEEEIKTTNPVATEEYGXVATNLQSXNTAPQTGTVNSQGALPGMVWQNRDVYLQGPIWAKIPHTDGNFHPSPLMGGFGLKHPPPQILIKNTPVPANPPTTFXPAKFASFITQYSTGQVSVEIEWELQKENSKRWNPEIQYTSNYNKSTNVDFAVDTEGVYSEPRPIGTRYLTRNL

SEQ ID NO: 2190 - DNA, 2211 bp, Artificial Sequence
  Description of Artificial Sequence: Synthetic polynucleotide
  misc_feature (469)..(471): n is a, c, g, or t
  misc_feature (502)..(504): n is a, c, g, or t
  misc_feature (784)..(789): n is a, c, g, or t
  misc_feature (934)..(936): n is a, c, g, or t
  misc_feature (1234)..(1236): n is a, c, g, or t
  misc_feature (1378)..(1383): n is a, c, g, or t
  misc_feature (1654)..(1656): n is a, c, g, or t
  misc_feature (1666)..(1671): n is a, c, g, or t
  misc_feature (1687)..(1689): n is a, c, g, or t
  misc_feature (1738)..(1740): n is a, c, g, or t
  misc_feature (1762)..(1764): n is a, c, g, or t
  misc_feature (1990)..(1992): n is a, c, g, or t
atggctgccgatggttatcttccagattggctcgaggacaacctctctgagggcattcgcgagtggtgggacttgaaacctggagccccgaaacccaaagccaaccagcaaaagcaggacgacggccggggtctggtgcttcctggctacaagtacctcggacccttcaacggactcgacaagggggagcccgtcaacgcggcggacgcagcggccctcgagcacgacaaggcctacgaccagcagctcaaagcgggtgacaatccgtacctgcggtataaccacgccgacgccgagtttcaggagcgtctgcaagaagatacgtcttttgggggcaacctcgggcgagcagtcttccaggccaagaagcgggttctcgaacctctcggtctggttgaggaaggcgctaagacggctcctggaaagaagagaccggtagagcaatcaccccaggaaccagactcctctnnnggcatcggcaagaaaggccagcagcccgcgnnnaagagactcaactttgggcagactggcgactcagagtcagtgcccgaccctcaaccactcggagaaccccccgcagccccctctggtgtgggatctaatacaatggctgcaggcggtggcgctccaatggcagacaataacgaaggcgccgacggagtgggtaatgcctcaggaaattggcattgcgattccacatggctgggcgacagagtcatcaccaccagcacccgaacctgggccctccccacctacaacaaccacctctacaagcaaatctccnnnnnncaatcgggaggaagcaccaacgacaacacctacttcggctacagcaccccctgggggtattttgactttaacagattccactgccacttctcaccacgtgactggcagcgactcatcaacaacaactggggattccggcccaagnnnctcaacttcaagctcttcaacatccaggtcaaggaggtcacgacgaatgatggcaccacgaccatcgccaataaccttaccagcacggttcaggtctttacggactcggaataccagctcccgtacgtcctcggctctgcgcaccagggctgcctgcctccgttcccggcggacgtcttcatgattcctcagtacgggtacctgactctgaacaatggcagtcaggccgtgggccgttcctccttctactgcctggagtactttccttctcaaatgctgagaacgggcaacaactttnnnttcagctacacgtttgaggacgtgccttttcacagcagctacgcgcacagccaaagcctggaccggctgatgaaccccctcatcgaccagtacctgtactacctgtctcggactcagaccacgggaggtaccgcaggaaatnnnnnnttgcaattttctcaggccgggcctagtagcatggcgaatcaggccaaaaactggctacccgggccctgctaccggcagcaacgcgtctccaagacaacgaatcaaaataacaacagcaactttgcctggaccggtgccaccaagtatcatctgaatggcagagactctctggtaaatcccggtgtcgctatggcaacccacaaggacgacgaagaccgattttttccgtccagcggagtcttaatatttgggaaacagggagctggaaatnnnaacgtggacnnnnnnaacgttatgataaccnnngaggaagaaattaaaaccaccaacccagtggccacagaagagtacggcnnngtggccactaacctgcaatcgnnnaacaccgctcctcaaacagggaccgtcaacagtcaaggagccttacctggcatggtctggcagaaccgggacgtgtacctgcagggtcctatctgggccaagattcctcacacggacggaaactttcatccctcgccgctgatgggaggctttggactgaaacacccgcctcctcagatcctgattaagaatacacctgttcccgcgaatcctccaactaccttcnnnccagctaagtttgcgtcgttcatcacgcagtacagcaccggacaggtcagcgtggaaattgaatgggagctgcagaaagaaaacagcaaacgctggaacccagagattcaatacacttccaactacaacaaatctacaaatgtggactttgctgttgacacagaaggcgtttattctgagcctcgccccatcggcacccgttacctcacccgtaatctg

SEQ ID NO: 2191 - protein, 738 aa, Artificial Sequence
  Description of Artificial Sequence: Synthetic polypeptide
  MOD_RES (158)..(158): Xaa can be any naturally occurring amino acid
  MOD_RES (169)..(169): Xaa can be any naturally occurring amino acid
  MOD_RES (564)..(564): Xaa can be any naturally occurring amino acid
MAADGYLPDWLEDNLSEGIREWWDLKPGAPKPKANQQKQDDGRGLVLPGYKYLGPFNGLDKGEPVNAADAAALEHDKAYDQQLKAGDNPYLRYNHADAEFQERLQEDTSFGGNLGRAVFQAKKRVLEPLGLVEEGAKTAPGKKRPVEQSPQREPDSSXGIGKKGQQPAXKRLNFGQTGDSESVPDPQPLGEPPAAPSGVGSNTMAAGGGAPMADNNEGADGVGNSSGNWHCDSTWLGDRVITTSTRTWALPTYNNHLYKQISNGTSGGSTNDNTYFGYSTPWGYFDFNRFHCHFSPRDWQRLINNNWGFRPKRLNFKLFNIQVKEVTTNEGTKTIANNLTSTVQVFTDSEYQLPYVLGSAHQGCLPPFPADVFMIPQYGYLTLNNGSQAVGRSSFYCLEYFPSQMLRTGNNFQFSYTFEDVPFHSSYAHSQSLDRLMNPLIDQYLYYLSRTQTTGGTAGTQTLQFSQAGPSSMANQAKNWLPGPCYRQQRVSTTTNQNNNSNFAWTGATKYHLNGRDSLVNPGVAMATHKDDEDRFFPSSGVLIFGKQGAGNDNVDYSNVMITXEEEIKTTNPVATEEYGVVATNLQSANTAPQTGTVNSQGALPGMVWQNRDVYLQGPIWAKIPHTDGNFHPSPLMGGFGLKHPPPQILIKNTPVPADPPTTFNQAKLNSFITQYSTGQVSVEIEWELQKENSKRWNPEIQYTSNYYKSTNVDFAVNTEGVYSEPRPIGTRYLTRNL

SEQ ID NO: 2192 - DNA, 2214 bp, Artificial Sequence
  Description of Artificial Sequence: Synthetic polynucleotide
  misc_feature (472)..(474): n is a, c, g, or t
  misc_feature (505)..(507): n is a, c, g, or t
  misc_feature (1690)..(1692): n is a, c, g, or t
atggctgccgatggttatcttccagattggctcgaggacaacctctctgagggcattcgcgagtggtgggacctgaaacctggagccccgaaacccaaagccaaccagcaaaagcaggacgacggccggggtctggtgcttcctggctacaagtacctcggacccttcaacggactcgacaagggggagcccgtcaacgcggcggacgcagcggccctcgagcacgacaaggcctacgaccagcagctcaaagcgggtgacaatccgtacctgcggtataatcacgccgacgccgagtttcaggagcgtctgcaagaagatacgtcttttgggggcaacctcgggcgagcagtcttccaggccaagaagcgggttctcgaacctctcggtctggttgaggaaggcgctaagacggctcctggaaagaagagaccggtagagcagtcaccacagcgtgagcccgactcctccnnnggcatcggcaagaaaggccagcagcccgccnnnaagagactcaatttcggtcagactggcgactcagagtcagtccccgaccctcaacctctcggagaacctccagcagcgccctctggtgtgggatctaatacaatggctgcaggcggtggcgcaccaatggcagacaataacgaaggtgccgacggagtgggtaattcctcgggaaattggcattgcgattccacatggctgggcgacagagtcatcaccaccagcacccgaacctgggccctgcccacctacaacaaccacctctacaagcaaatctccaacgggacctcgggaggcagcaccaacgacaacacctactttggctacagcaccccctgggggtattttgactttaacagattccactgccacttctcaccacgtgactggcagcgactcatcaacaacaactggggattccggcccaagagactcaacttcaagctcttcaacatccaggtcaaagaggtcacgacgaatgaaggcaccaagaccatcgccaataacctcaccagcaccgtccaggtgtttacggactcggaataccagctgccgtacgtcctcggctctgcccaccagggctgcctgcctccgttcccggcggacgtcttcatgattcctcagtacggctacctgactctcaacaacggtagtcaggccgtgggacgttcctccttctactgcctggagtacttcccctctcagatgctgagaacgggcaacaactttcaattcagctacactttcgaggacgtgcctttccacagcagctacgcgcacagccagagtttggacaggctgatgaatcctctcatcgaccagtacctgtactacctgtcaagaacccagactacgggaggcacagcgggaacccagacgttgcagttttctcaggccgggcctagcagcatggcgaatcaggccaaaaactggctgcctggaccctgctacagacagcagcgcgtctccacgacaacgaatcaaaacaacaacagcaactttgcctggactggtgccaccaagtatcatctgaacggcagagactctctggtgaatccgggcgtcgccatggcaacccacaaggacgacgaggaccgcttcttcccatccagcggcgtcctcatatttggcaagcagggagctggaaatgacaacgtggactatagcaacgtgatgataaccnnngaggaagaaatcaagaccaccaaccccgtggccacagaagagtatggcgtggtggctactaacctacagtcggcaaacaccgctcctcaaacggggaccgtcaacagccagggagccttacctggcatggtctggcagaaccgggacgtgtacctgcagggtcctatttgggccaagattcctcacacagatggcaactttcacccgtctcctttaatgggcggctttggacttaaacatccgcctcctcagatcctcatcaaaaacactcctgttcctgcggatcctccaacaacgttcaaccaggccaagctgaattctttcatcacgcagtacagcaccggacaagtcagcgtggagatcgagtgggagctgcagaaggagaacagcaagcgctggaacccagagattcagtatacttccaactactacaaatctacaaatgtggactttgctgttaatactgagggtgtttactctgagcctcgccccattggcactcgttacctcacccgtaatctg

SEQ ID NO: 2193 - protein, 738 aa, Artificial Sequence
  Description of Artificial Sequence: Synthetic polypeptide
  MOD_RES (158)..(158): Xaa can be any naturally occurring amino acid
  MOD_RES (169)..(169): Xaa can be any naturally occurring amino acid
  MOD_RES (315)..(315): Xaa can be any naturally occurring amino acid
  MOD_RES (413)..(413): Xaa can be any naturally occurring amino acid
  MOD_RES (472)..(472): Xaa can be any naturally occurring amino acid
  MOD_RES (534)..(534): Xaa can be any naturally occurring amino acid
  MOD_RES (542)..(542): Xaa can be any naturally occurring amino acid
  MOD_RES (595)..(595): Xaa can be any naturally occurring amino acid
MAADGYLPDWLEDNLSEGIREWWDLKPGAPKPKANQQKQDDGRGLVLPGYKYLGPFNGLDKGEPVNAADAAALEHDKAYDQQLKAGDNPYLRYNHADAEFQERLQEDTSFGGNLGRAVFQAKKRVLEPLGLVEEGAKTAPGKKRPVEQSPQREPDSSXGIGKKGQQPAXKRLNFGQTGDSESVPDPQPLGEPPAAPSGVGSNTMAAGGGAPMADNNEGADGVGSSSGNWHCDSTWLGDRVITTSTRTWALPTYNNHLYKQISNGTSGGSTNDNTYFGYSTPWGYFDFNRFHCHFSPRDWQRLINNNWGFRPKRLXFKLFNIQVKEVTQNEGTKTIANNLTSTIQVFTDSEYQLPYVLGSAHQGCLPPFPADVFMIPQYGYLTLNNGSQAVGRSSFYCLEYFPSQMLRTGNNFXFSYTFEDVPFHSSYAHSQSLDRLMNPLIDQYLYYLSRTQTTGGTAGTQTLQFSQAGPSXMANQAKNWLPGPCYRQQRVSTTTSQNNNSNFAWTGATKYHLNGRDSLVNPGVAMATHKDDEXRFFPSSGXLIFGKQGAGKDNVDYSNVMLTSEEEIKTTNPVATEEYGVVADNLQQQNTAPQXGTVNSQGALPGMVWQNRDVYLQGPIWAKIPHTDGNFHPSPLMGGFGLKHPPPQILIKNTPVPADPPTTFNQAKLNSFITQYSTGQVSVEIEWELQKENSKRWNPEIQYTSNYYKSTNVDFAVNTEGVYSEPRPIGTRYLTRNL

SEQ ID NO: 2194 - DNA, 2214 bp, Artificial Sequence
  Description of Artificial Sequence: Synthetic polynucleotide
  misc_feature (472)..(474): n is a, c, g, or t
  misc_feature (505)..(507): n is a, c, g, or t
  misc_feature (943)..(945): n is a, c, g, or t
  misc_feature (1237)..(1239): n is a, c, g, or t
  misc_feature (1414)..(1416): n is a, c, g, or t
  misc_feature (1600)..(1602): n is a, c, g, or t
  misc_feature (1624)..(1626): n is a, c, g, or t
  misc_feature (1783)..(1785): n is a, c, g, or t
atggctgccgatggttatcttccagattggctcgaggacaacctctctgagggcattcgcgagtggtgggacctgaaacctggagccccgaaacccaaagccaaccagcaaaagcaggacgacggccggggtctggtgcttcctggctacaagtacctcggacccttcaacggactcgacaagggggagcccgtcaacgcggcggacgcagcggccctcgagcacgacaaggcctacgaccagcagctcaaagcgggtgacaatccgtacctgcggtataatcacgccgacgccgagtttcaggagcgtctgcaagaagatacgtcttttgggggcaacctcgggcgagcagtcttccaggccaagaagcgggttctcgaacctctcggtctggttgaggaaggcgctaagacggctcctggaaagaagagaccggtagagcagtcaccacagcgtgagcccgactcctccnnnggcatcggcaagaaaggccagcagcccgccnnnaagagactcaatttcggtcagactggcgactcagagtcagtccccgaccctcaacctctcggagaacctccagcagcgccctctggtgtgggatctaatacaatggctgcaggcggtggcgcaccaatggcagacaataacgaaggtgccgacggagtgggtagttcctcgggaaattggcattgcgattccacatggctgggcgacagagtcatcaccaccagcacccgaacctgggccctgcccacctacaacaaccacctctacaagcaaatctccaacgggacctcgggaggcagcaccaacgacaacacctactttggctacagcaccccctgggggtattttgactttaacagattccactgccacttctcaccacgtgactggcagcgactcatcaacaacaactggggattccggcccaagagactcnnnttcaagctcttcaacatccaggtcaaagaggtcacgcagaatgaaggcaccaagaccatcgccaataacctcaccagcaccatccaggtgtttacggactcggaataccagctgccgtacgtcctcggctctgcccaccagggctgcctgcctccgttcccggcggacgtcttcatgattcctcagtacggctacctgactctcaacaacggtagtcaggccgtgggacgttcctccttctactgcctggagtacttcccctctcagatgctgagaacgggcaacaactttnnnttcagctacactttcgaggacgtgcctttccacagcagctacgcgcacagccagagtttggacaggctgatgaatcctctcatcgaccagtacctgtactacctgtcaagaacccagactacgggaggcacagcgggaacccagacgttgcagttttctcaggccgggcctagcnnnatggcgaatcaggccaaaaactggctgcctggaccctgctacagacagcagcgcgtctccacgacaacgtcgcaaaacaacaacagcaactttgcctggactggtgccaccaagtatcatctgaacggcagagactctctggtgaatccgggcgtcgccatggcaacccacaaggacgacgagnnncgcttcttcccatccagcggcnnnctcatatttggcaagcagggagctggaaaagacaacgtggactatagcaacgtgatgctaaccagcgaggaagaaatcaagaccaccaaccccgtggccacagaagagtatggcgtggtggctgataacctacagcagcaaaacaccgctcctcaannngggaccgtcaacagccagggagccttacctggcatggtctggcagaaccgggacgtgtacctgcagggtcctatttgggccaagattcctcacacagatggcaactttcacccgtctcctttaatgggcggctttggacttaaacatccgcctcctcagatcctcatcaaaaacactcctgttcctgcggatcctccaacaacgttcaaccaggccaagctgaattctttcatcacgcagtacagcaccggacaagtcagcgtggagatcgagtgggagctgcagaaggagaacagcaagcgctggaacccagagattcagtatacttccaactactacaaatctacaaatgtggactttgctgttaatactgagggtgtttactctgagcctcgccccattggcactcgttacctcacccgtaatctg

SEQ ID NO: 2195 - protein, 738 aa, Artificial Sequence
  Description of Artificial Sequence: Synthetic polypeptide
  MOD_RES (169)..(169): Xaa can be any naturally occurring amino acid
  MOD_RES (315)..(315): Xaa can be any naturally occurring amino acid
  MOD_RES (534)..(534): Xaa can be any naturally occurring amino acid
  MOD_RES (542)..(542): Xaa can be any naturally occurring amino acid
MAADGYLPDWLEDNLSEGIREWWDLKPGAPKPKANQQKQDDGRGLVLPGYKYLGPFNGLDKGEPVNAADAAALEHDKAYDQQLKAGDNPYLRYNHADAEFQERLQEDTSFGGNLGRAVFQAKKRVLEPLGLVEEGAKTAPGKKRPVEPSPQRSPDSSTGIGKKGQQPAXKRLNFGQTGDSESVPDPQPIGEPPAAPSGVGSGTMAAGGGAPMADNNEGADGVGSSSGNWHCDSTWLGDRVITTSTRTWALPTYNNHLYKQISNGTSGGSTNDNTYFGYSTPWGYFDFNRFHCHFSPRDWQRLINNNWGFRPKRLXFKLFNIQVKEVTQNEGTKTIANNLTSTIQVFTDSEYQLPYVLGSAHQGCLPPFPADVFMIPQYGYLTLNNGSQAVGRSSFYCLEYFPSQMLRTGNNFEFSYTFEDVPFHSSYAHSQSLDRLMNPLIDQYLYYLSRTQSTGGTAGTQQLLFSQAGPSNMSAQAKNWLPGPCYRQQRVSTTLSQNNNSNFAWTGATKYHLNGRDSLVNPGVAMATHKDDEXRFFPSSGXLMFGKQGAGKDNVDYSNVMLTSEEEIKTTNPVATEQYGVVADNLQQQNTAPIVGAVNSQGALPGMVWQNRDVYLQGPIWAKIPHTDGNFHPSPLMGGFGLKHPPPQILIKNTPVPADPPTTFNQAKLNSFITQYSTGQVSVEIEWELQKENSKRWNPEIQYTSNYYKSTNVDFAVNTEGVYSEPRPIGTRYLTRNL

SEQ ID NO: 2196 - DNA, 2214 bp, Artificial Sequence
  Description of Artificial Sequence: Synthetic polynucleotide
  misc_feature (505)..(507): n is a, c, g, or t
  misc_feature (943)..(945): n is a, c, g, or t
  misc_feature (1600)..(1602): n is a, c, g, or t
  misc_feature (1624)..(1626): n is a, c, g, or t
atggctgccgatggttatcttccagattggctcgaggacaacctctctgagggcattcgcgagtggtgggacctgaaacctggagccccgaaacccaaagccaaccagcaaaagcaggacgacggccggggtctggtgcttcctggctacaagtacctcggacccttcaacggactcgacaagggggagcccgtcaacgcggcggacgcagcggccctcgagcacgacaaggcctacgaccagcagctcaaagcgggtgacaatccgtacctgcggtataatcacgccgacgccgagtttcaggagcgtctgcaagaagatacgtcttttgggggcaacctcgggcgagcagtcttccaggccaagaagcgggttctcgaacctctcggtctggttgaggaaggcgctaagacggctcctggaaagaagagaccggtagagccgtcaccacagcgttcccccgactcctccacgggcatcggcaagaaaggccagcagcccgccnnnaagagactcaatttcggtcagactggcgactcagagtcagtccccgaccctcaacctatcggagaacctccagcagcgccctctggtgtgggatctggtacaatggctgcaggcggtggcgcaccaatggcagacaataacgaaggtgccgacggagtgggtagttcctcgggaaattggcattgcgattccacatggctgggcgacagagtcatcaccaccagcacccgaacctgggccctgcccacctacaacaaccacctctacaagcaaatctccaacgggacctcgggaggcagcaccaacgacaacacctactttggctacagcaccccctgggggtattttgactttaacagattccactgccacttctcaccacgtgactggcagcgactcatcaacaacaactggggattccggcccaagagactcnnnttcaagctcttcaacatccaggtcaaagaggtcacgcagaatgaaggcaccaagaccatcgccaataacctcaccagcaccatccaggtgtttacggactcggaataccagctgccgtacgtcctcggctctgcccaccagggctgcctgcctccgttcccggcggacgtcttcatgattcctcagtacggctacctgactctcaacaacggtagtcaggccgtgggacgttcctccttctactgcctggagtacttcccctctcagatgctgagaacgggcaacaactttgagttcagctacactttcgaggacgtgcctttccacagcagctacgcgcacagccagagtttggacaggctgatgaatcctctcatcgaccagtacctgtactacctgtcaagaacccagtctacgggaggcacagcgggaacccagcagttgctgttttctcaggccgggcctagcaacatgtcggctcaggccaaaaactggctgcctggaccctgctacagacagcagcgcgtctccacgacactgtcgcaaaacaacaacagcaactttgcctggactggtgccaccaagtatcatctgaacggcagagactctctggtgaatccgggcgtcgccatggcaacccacaaggacgacgagnnncgcttcttcccatccagcggcnnnctcatgtttggcaagcagggagctggaaaagacaacgtggactatagcaacgtgatgctaaccagcgaggaagaaatcaagaccaccaaccccgtggccacagaacagtatggcgtggtggctgataacctacagcagcaaaacaccgctcctattgtgggggccgtcaacagccagggagccttacctggcatggtctggcagaaccgggacgtgtacctgcagggtcctatttgggccaagattcctcacacagatggcaactttcacccgtctcctttaatgggcggctttggacttaaacatccgcctcctcagatcctcatcaaaaacactcctgttcctgcggatcctccaacaacgttcaaccaggccaagctgaattctttcatcacgcagtacagcaccggacaagtcagcgtggagatcgagtgggagctgcagaaggagaacagcaagcgctggaacccagagattcagtatacttccaactactacaaatctacaaatgtggactttgctgttaatactgagggtgtttactctgagcctcgccccattggcactcgttacctcacccgtaatctg

SEQ ID NO: 2197 - protein, 738 aa, Artificial Sequence
  Description of Artificial Sequence: Synthetic polypeptide
  MOD_RES (471)..(471): Xaa can be any naturally occurring amino acid
MAADGYLPDWLEDNLSEGIREWWDLKPGAPKPKANQQKQDDGRGLVLPGYKYLGPFNGLDKGEPVNAADAAALEHDKAYDQQLKAGDNPYLRYNHADAEFQERLQEDTSFGGNLGRAVFQAKKRVLEPLGLVEEGAKTAPGKKRPVEPSPQRSPDSSTGIGKKGQQPAKKRLNFGQTGDSESVPDPQPIGEPPAGPSGLGSGTMAAGGGAPMADNNEGADGVGSSSGNWHCDSTWLGDRVITTSTRTWALPTYNNHLYKQISNGTSGGSTNDNTYFGYSTPWGYFDFNRFHCHFSPRDWQRLINNNWGFRPKRLNFKLFNIQVKEVTQNEGTKTIANNLTSTIQVFTDSEYQLPYVLGSAHQGCLPPFPADVFMIPQYGYLTLNNGSQAVGRSSFYCLEYFPSQMLRTGNNFEFSYTFEDVPFHSSYAHSQSLDRLMNPLIDQYLYYLSRTQSTGGTAGTQQLLFSQAGPXNMSAQAKNWLPGPCYRQQRVSTTLSQNNNSNFAWTGATKYHLNGRDSLVNPGVAMATHKDDEERFFPSSGVLMFGKQGAGKDNVDYSSVMLTSEEEIKTTNPVATEQYGVVADNLQQQNTAPIVGAVNSQGALPGMVWQNRDVYLQGPIWAKIPHTDGNFHPSPLMGGFGLKHPPPQILIKNTPVPADPPTTFSQAKLASFITQYSTGQVSVEIEWELQKENSKRWNPEIQYTSNYYKSTNVDFAVNTEGTYSEPRPIGTRYLTRNL

SEQ ID NO: 2198 - DNA, 2214 bp, Artificial Sequence
  Description of Artificial Sequence: Synthetic polynucleotide
  misc_feature (1411)..(1413): n is a, c, g, or t
atggctgccgatggttatcttccagattggctcgaggacaacctctctgagggcattcgcgagtggtgggacttgaaacctggagccccgaaacccaaagccaaccagcaaaagcaggacgacggccggggtctggtgcttcctggctacaagtacctcggacccttcaacggactcgacaagggggagcccgtcaacgcggcggacgcagcggccctcgagcacgacaaggcctacgaccagcagctcaaagcgggtgacaatccgtacctgcggtataaccacgccgacgccgagtttcaggagcgtctgcaagaagatacgtcttttgggggcaacctcgggcgagcagtcttccaggccaagaagcgggttctcgaacctctcggtctggttgaggaaggcgctaagacggctcctggaaagaagagaccggtagagccatcaccccagcgttctccagactcctctacgggcatcggcaagaaaggccagcagcccgcgaaaaagagactcaactttgggcagactggcgactcagagtcagtgcccgaccctcaaccaatcggagaaccccccgcaggcccctctggtctgggatctggtacaatggctgcaggcggtggcgctccaatggcagacaataacgaaggcgccgacggagtgggtagttcctcaggaaattggcattgcgattccacatggctgggcgacagagtcatcaccaccagcacccgaacctgggccctccccacctacaacaaccacctctacaagcaaatctccaacgggacttcgggaggaagcaccaacgacaacacctacttcggctacagcaccccctgggggtattttgactttaacagattccactgccacttctcaccacgtgactggcagcgactcatcaacaacaactggggattccggcccaagagactcaacttcaagctcttcaacatccaggtcaaggaggtcacgcagaatgaaggcaccaagaccatcgccaataaccttaccagcacgattcaggtctttacggactcggaataccagctcccgtacgtcctcggctctgcgcaccagggctgcctgcctccgttcccggcggacgtcttcatgattcctcagtacgggtacctgactctgaacaatggcagtcaggccgtgggccgttcctccttctactgcctggagtactttccttctcaaatgctgagaacgggcaacaactttgagttcagctacacgtttgaggacgtgccttttcacagcagctacgcgcacagccaaagcctggaccggctgatgaaccccctcatcgaccagtacctgtactacctgtctcggactcagtccacgggaggtaccgcaggaactcagcagttgctattttctcaggccgggcctnnnaacatgtcggctcaggccaaaaactggctacccgggccctgctaccggcagcaacgcgtctccacgacactgtcgcaaaataacaacagcaactttgcctggaccggtgccaccaagtatcatctgaatggcagagactctctggtaaatcccggtgtcgctatggcaacccacaaggacgacgaagagcgattttttccgtccagcggagtcttaatgtttgggaaacagggagctggaaaagacaacgtggactatagcagcgttatgctaaccagtgaggaagaaattaaaaccaccaacccagtggccacagaacagtacggcgtggtggccgataacctgcaacagcaaaacaccgctcctattgtaggggccgtcaacagtcaaggagccttacctggcatggtctggcagaaccgggacgtgtacctgcagggtcctatctgggccaagattcctcacacggacggaaactttcatccctcgccgctgatgggaggctttggactgaaacacccgcctcctcagatcctgattaagaatacacctgttcccgcggatcctccaactaccttcagtcaagctaagctggcgtcgttcatcacgcagtacagcaccggacaggtcagcgtggaaattgaatgggagctgcagaaagaaaacagcaaacgctggaacccagagattcaatacacttccaactactacaaatctacaaatgtggactttgctgttaacacagaaggcacttattctgagcctcgccccatcggcacccgttacctcacccgtaatctg

SEQ ID NO: 2199 - protein, 737 aa, Artificial Sequence
  Description of Artificial Sequence: Synthetic polypeptide
  MOD_RES (148)..(148): Xaa can be any naturally occurring amino acid
  MOD_RES (169)..(169): Xaa can be any naturally occurring amino acid
  MOD_RES (314)..(314): Xaa can be any naturally occurring amino acid
  MOD_RES (466)..(466): Xaa can be any naturally occurring amino acid
  MOD_RES (563)..(563): Xaa can be any naturally occurring amino acid
  MOD_RES (580)..(580): Xaa can be any naturally occurring amino acid
  MOD_RES (588)..(588): Xaa can be any naturally occurring amino acid
MAADGYLPDWLEDNLSEGIREWWDLKPGAPKPKANQQKQDDGRGLVLPGYKYLGPFNGLDKGEPVNAADAAALEHDKAYDQQLKAGDNPYLRYNHADAEFQERLQEDTSFGGNLGRAVFQAKKRVLEPLGLVEEGAKTAPGKKRPVEXSPQRSPDSSTGIGKKGQQPAXKRLNFGQTGDSESVPDPQPLGEPPAAPSGVGSGTMAAGGGAPMADNNEGADGVGNASGNWHCDSTWLGDRVITTSTRTWALPTYNNHLYKQISSQSAGSTNDNTYFGYSTPWGYFDFNRFHCHFSPRDWQRLINNNWGFRPKKLXFKLFNIQVKEVTTNDGVTTIANNLTSTVQVFSDSEYQLPYVLGSAHQGCLPPFPADVFMIPQYGYLTLNNGSQSVGRSSFYCLEYFPSQMLRTGNNFEFSYTFEDVPFHSSYAHSQSLDRLMNPLIDQYLYYLARTQSTTGGTAGNRELQFXQAGPSTMAEQAKNWLPGPCYRQQRVSKTLDQNNNSNFAWTGATKYHLNGRNSLVNPGVAMATHKDDEDRFFPSSGVLIFGKTGAANKTTLENVLMTXEEEIKTTNPVATEEYGXVSSNLQSXNTAPQTQTVNSQGALPGMVWQNRDVYLQGPIWAKIPHTDGNFHPSPLMGGFGLKHPPPQILIKNTPVPANPPEVFTPAKFASFITQYSTGQVSVEIEWELQKENSKRWNPEIQYTSNYDKSTNVDFAVDSEGVYSEPRPIGTRYLTRNL

SEQ ID NO: 2200 - DNA, 2211 bp, Artificial Sequence
  Description of Artificial Sequence: Synthetic polynucleotide
  misc_feature (442)..(444): n is a, c, g, or t
  misc_feature (505)..(507): n is a, c, g, or t
  misc_feature (940)..(942): n is a, c, g, or t
  misc_feature (1396)..(1398): n is a, c, g, or t
  misc_feature (1687)..(1689): n is a, c, g, or t
  misc_feature (1738)..(1740): n is a, c, g, or t
  misc_feature (1762)..(1764): n is a, c, g, or t
atggctgccgatggttatcttccagattggctcgaggacaacctctctgagggcattcgcgagtggtgggacctgaaacctggagccccgaaacccaaagccaaccagcaaaagcaggacgacggccggggtctggtgcttcctggctacaagtacctcggacccttcaacggactcgacaagggggagcccgtcaacgcggcggacgcagcggccctcgagcacgacaaggcctacgaccagcagctcaaagcgggtgacaatccgtacctgcggtataaccacgccgacgccgagtttcaggagcgtctgcaagaagatacgtcatttgggggcaacctcgggcgagcagtcttccaggccaagaagcgggttctcgaacctctcggtctggttgaggaaggcgctaagacggctcctggaaagaagagaccggtagagnnntcacctcagcgttcccccgactcctccacgggcatcggcaagaaaggccagcagcccgccnnnaagagactcaatttcggtcagactggcgactcagagtcagtccccgaccctcaacctctcggagaacctccagcagcgccctctggtgtgggatctggtacaatggctgcaggcggtggcgcaccaatggcagacaataacgaaggtgccgacggagtgggtaatgcctcaggaaattggcattgcgattccacatggctgggcgacagagtcattaccaccagcacccgaacctgggccctgcccacctacaacaaccacctctacaagcaaatctccagtcaaagtgcaggtagtaccaacgacaacacctacttcggctacagcaccccctgggggtattttgactttaacagattccactgccacttctcaccacgtgactggcagcgactcatcaacaacaactggggattccggcccaagaagctgnnnttcaagctcttcaacatccaggtcaaggaggtcacgacgaatgacggcgttacgaccatcgctaataaccttaccagcacggttcaggtattctcggactcggaataccagctgccgtacgtcctcggctctgcgcaccagggctgcctgcctccgttcccggcggacgtcttcatgattcctcagtacggctacctgactctcaacaatggcagtcagtctgtgggacgttcctccttctactgcctggagtacttcccctctcagatgctgagaacgggcaacaactttgagttcagctacaccttcgaggacgtgcctttccacagcagctacgcacacagccagagcctggaccggctgatgaatcccctcatcgaccagtacttgtactacctggccagaacacagagtaccacaggaggcacagctggcaatcgggaactgcagtttnnncaggccgggccttcaactatggccgaacaagccaagaattggttacctggaccttgctaccggcaacaaagagtctccaaaacgctggatcaaaacaacaacagcaactttgcttggactggtgccaccaaatatcacctgaacggcagaaactcgttggttaatcccggcgtcgccatggcaactcacaaggacgacgaggaccgctttttcccatccagcggagtcctgatttttggaaaaactggagcagctaacaaaactacattggaaaatgtgttaatgacannngaagaagaaattaaaactactaatcctgtagccacggaagaatacgggnnngtcagcagcaacttacaatcgnnnaatactgcaccccagacacaaactgtcaacagccagggagccttacctggcatggtctggcagaaccgggacgtgtacctgcagggtcccatctgggccaagattcctcacacggatggcaactttcacccgtctcctttgatgggcggctttggacttaaacatccgcctcctcagatcctgatcaagaacactcccgttcccgctaatcctccggaggtgtttactcctgccaagtttgcttcgttcatcacacagtacagcaccggacaagtcagcgtggaaatcgagtgggagctgcagaaggaaaacagcaagcgctggaacccggagattcagtacacctccaactatgataagtcgactaatgtggactttgccgttgacagcgagggtgtttactctgagcctcgccctattggcactcgttacctcacccgtaatctg

SEQ ID NO: 2201 - protein, 735 aa, Artificial Sequence
  Description of Artificial Sequence: Synthetic polypeptide
  MOD_RES (162)..(162): Xaa can be any naturally occurring amino acid
  MOD_RES (168)..(168): Xaa can be any naturally occurring amino acid
  MOD_RES (224)..(224): Xaa can be any naturally occurring amino acid
  MOD_RES (310)..(310): Xaa can be any naturally occurring amino acid
  MOD_RES (410)..(410): Xaa can be any naturally occurring amino acid
  MOD_RES (446)..(446): Xaa can be any naturally occurring amino acid
  MOD_RES (461)..(461): Xaa can be any naturally occurring amino acid
  MOD_RES (471)..(471): Xaa can be any naturally occurring amino acid
  MOD_RES (708)..(708): Xaa can be any naturally occurring amino acid
MAADGYLPDWLEDNLSEGIREWWDLKPGAPKPKANQQKQDDGRGLVLPGYKYLGPFNGLDKGEPVNAADAAALEHDKAYDQQLKAGDNPYLRYNHADAEFQERLQEDTSFGGNLGRAVFQAKKRVLEPLGLVEEGAKTAPGKKRPVEQSPQEPDSSSGIGKXGQQPAXKRLNFGQTGDSESVPDPQPLGEPPAAPSGVGSNTMASGGGAPMADNNEGADGVGNXSGNWHCDSTWLGDRVITTSTRTWALPTYNNHLYKQISSQSGASNDNHYFGYSTPWGYFDFNRFHCHFSPRDWQRLINNNWGFRPKXLNFKLFNIQVKEVTTNDGTTTIANNLTSTVQVFTDSEYQLPYVLGSAHQGCLPPFPADVFMIPQYGYLTLNNGSQAVGRSSFYCLEYFPSQMLRTGNNFXFSYTFEDVPFHSSYAHSQSLDRLMNPLIDQYLYYLXRTQTTSGTAQNRELXFSQAGPSSMXNQAKNWLPGPCYRQQRVSKTANDNNNSNFAWTGATKYHLNGRDSLVNPGPAMASHKDDEDKFFPMSGVLIFGKQGAGASNVDLDNVMITDEEEIKTTNPVATEQYGTVATNLQSSNTAPATGTVNSQGALPGMVWQDRDVYLQGPIWAKIPHTDGHFHPSPLMGGFGLKHPPPQILIKNTPVPANPPTTFSPAKFASFITQYSTGQVSVEIEWELQKENSKRWNPEIQYTSNYNKSXNVDFTVDTNGVYSEPRPIGTRYLTRNL

SEQ ID NO: 2202 - DNA, 2205 bp, Artificial Sequence
  Description of Artificial Sequence: Synthetic polynucleotide
  misc_feature (484)..(486): n is a, c, g, or t
  misc_feature (502)..(504): n is a, c, g, or t
  misc_feature (670)..(672): n is a, c, g, or t
  misc_feature (928)..(930): n is a, c, g, or t
  misc_feature (1228)..(1230): n is a, c, g, or t
  misc_feature (1336)..(1338): n is a, c, g, or t
  misc_feature (1381)..(1383): n is a, c, g, or t
  misc_feature (1411)..(1413): n is a, c, g, or t
  misc_feature (2122)..(2124): n is a, c, g, or t
atggctgccgatggttatcttccagattggctcgaggacaacctctctgagggcattcgcgagtggtgggacttgaaacctggagccccgaaacccaaagccaaccagcaaaagcaggacgacggccggggtctggtgcttcctggctacaagtacctcggacccttcaacggactcgacaagggggagcccgtcaacgcggcggatgcagcggccctcgagcacgacaaggcctacgaccagcagctcaaagcgggtgacaatccgtacctgcggtataaccacgccgacgccgagtttcaggagcgtctgcaagaagatacgtcttttgggggcaacctcgggcgagcagtcttccaggccaagaagagggttctcgaacctcttggtctggttgaggaaggtgctaagacggctcctggaaagaaacgtccggtagagcagtcgccacaagagccagactcctcctcgggcattggcaagnnnggccagcagcccgctnnnaagagactcaattttggtcagactggcgactcagagtcagtccccgacccacaacctctcggagaacctccagcagccccctctggtgtgggatctaatacaatggcttcaggcggtggcgcaccaatggcagacaataacgaaggcgccgacggagtgggtaatnnntcaggaaattggcattgcgattccacatggctgggcgacagagtcatcaccaccagcacccgaacatgggccttgcccacctataacaaccacctctacaagcaaatctccagtcaatcaggggccagcaacgacaaccactacttcggctacagcaccccctgggggtattttgatttcaacagattccactgccatttctcaccacgtgactggcagcgactcatcaacaacaattggggattccggcccaagnnnctcaacttcaagctcttcaacatccaagtcaaggaggtcacgacgaatgatggcaccacgaccatcgctaataaccttaccagcacggttcaagtcttcacggactcggagtaccagttgccgtacgtcctcggctctgcgcaccagggctgcctccctccgttcccggcggacgtgttcatgattccgcagtacggctacctaacgctcaacaatggcagccaggcagtgggacggtcatccttttactgcctggaatatttcccatcgcagatgctgagaacgggcaataactttnnnttcagctacaccttcgaggacgtgcctttccacagcagctacgcgcacagccagagcctggaccggctgatgaatcctctcatcgaccagtacctgtattacctgnnnagaactcagactacgtccggaactgcccaaaacagggagttgnnntttagccaggcgggtccatctagcatgnnnaatcaggccaaaaactggctacctggaccctgttaccggcagcagcgcgtttctaaaacagcaaatgacaacaacaacagcaactttgcctggactggtgctacaaaatatcaccttaatgggcgtgattctttagtcaaccctggccctgctatggcctcacacaaagacgacgaagacaagttctttcccatgagcggtgtcttgatttttggaaagcagggcgccggagcttcaaacgttgatttggacaatgtcatgatcacagacgaagaggaaatcaaaaccactaaccccgtggccaccgaacaatatgggactgtggcaaccaatctccagagcagcaacacagcccctgcgaccggaactgtgaattctcagggagccttacctggaatggtgtggcaagacagagacgtatacctgcagggtcctatttgggccaaaattcctcacacggatggacactttcacccgtctcctctcatgggcggctttggacttaagcacccgcctcctcagatcctcatcaaaaacacgcctgttcctgcgaatcctccgacaacgttttcgcctgcaaagtttgcttcattcatcacccagtattccacaggacaagtgagcgtggagattgaatgggagctgcagaaagaaaacagcaaacgctggaatcccgaaatacagtatacatctaactataataaatctnnnaacgttgatttcactgtggacaccaatggagtttatagtgagcctcgccccattggcacccgttacctcacccgtaacctg

SEQ ID NO: 2203 - protein, 735 aa, Artificial Sequence
  Description of Artificial Sequence: Synthetic polypeptide
  MOD_RES (42)..(42): Xaa can be any naturally occurring amino acid
  MOD_RES (168)..(168): Xaa can be any naturally occurring amino acid
  MOD_RES (310)..(310): Xaa can be any naturally occurring amino acid
  MOD_RES (410)..(410): Xaa can be any naturally occurring amino acid
  MOD_RES (446)..(446): Xaa can be any naturally occurring amino acid
  MOD_RES (461)..(461): Xaa can be any naturally occurring amino acid
  MOD_RES (471)..(471): Xaa can be any naturally occurring amino acid
  MOD_RES (475)..(475): Xaa can be any naturally occurring amino acid
  MOD_RES (504)..(504): Xaa can be any naturally occurring amino acid
  MOD_RES (539)..(539): Xaa can be any naturally occurring amino acid
MAADGYLPDWLEDNLSEGIREWWDLKPGAPQPKANQQHQDDXRGLVLPGYKYLGPFNGLDKGEPVNEADAAALEHDKAYDQQLKAGDNPYLKYNHADAEFQERLQEDTSFGGNLGRAVFQAKKRVLEPLGLVEEAAKTAPGKKRPVEQSPQEPDSSSGIGKSGQQPAXKRLNFGQTGDSESVPDPQPLGEPPAAPSGVGSNTMASGGGAPMADNNEGADGVGNSSGNWHCDSTWLGDRVITTSTRTWALPTYNNHLYKQISSQSGASNDNHYFGYSTPWGYFDFNRFHCHFSPRDWQRLINNNWGFRPKXLNFKLFNIQVKEVTQNDGTTTIANNLTSTVQVFTDSEYQLPYVLGSAHQGCLPPFPADVFMIPQYGYLTLNNGSQAVGRSSFYCLEYFPSQMLRTGNNFXFSYTFEDVPFHSSYAHSQSLDRLMNPLIDQYLYYLXRTQTTSGTTQQSRLXFSQAGPSSMXQQAXNWLPGPCYRQQRVSKTANDNNNSNFAWTXATKYHLNGRDSLVNPGPAMASHKDDEEKFFPMHGXLIFGKQGTGASNVDLDNVMITDEEEIRTTNPVATEQYGTVATNLQSSNTAPATGTVNSQGALPGMVWQDRDVYLQGPIWAKIPHTDGHFHPSPLMGGFGLKHPPPQILIKNTPVPANPPTTFSPAKFASFITQYSTGQVSVEIEWELQKENSKRWNPEIQYTSNYNKSVNVDFTVDTNGVYSEPRPIGTRYLTRNL

SEQ ID NO: 2204 - DNA, 2205 bp, Artificial Sequence
  Description of Artificial Sequence: Synthetic polynucleotide
  misc_feature (124)..(126): n is a, c, g, or t
  misc_feature (502)..(504): n is a, c, g, or t
  misc_feature (928)..(930): n is a, c, g, or t
  misc_feature (1228)..(1230): n is a, c, g, or t
  misc_feature (1336)..(1338): n is a, c, g, or t
  misc_feature (1381)..(1383): n is a, c, g, or t
  misc_feature (1411)..(1413): n is a, c, g, or t
  misc_feature (1423)..(1425): n is a, c, g, or t
  misc_feature (1510)..(1512): n is a, c, g, or t
  misc_feature (1615)..(1617): n is a, c, g, or t
atggctgctgacggttatcttccagattggctcgaggacaacctttctgaaggcattcgtgagtggtgggatctgaaacctggagcccctcaacccaaagcgaaccaacaacaccaggacgacnnncggggtcttgtgcttccgggttacaaatacctcggaccctttaacggactcgacaaaggagagccggtcaacgaggcggacgcggcagccctcgaacacgacaaagcttacgaccagcagctcaaggccggtgacaacccgtacctcaagtacaaccacgccgacgccgagtttcaggagcgtcttcaagaagatacgtcttttgggggcaaccttggcagagcagtcttccaggccaaaaagagggtccttgagcctcttggtctggttgaggaagcagctaaaacggctcctggaaagaagaggcctgtagaacagtctcctcaggaaccggactcatcatctggtattggcaaatcgggccaacagcctgccnnnaaaagactaaatttcggtcagactggagactcagagtcagtcccagaccctcaacctctcggagaaccaccagcagccccctcaggtgtgggatctaatacaatggcttcaggcggtggcgcaccaatggcagacaataacgagggtgccgatggagtgggtaattcctcaggaaattggcattgcgattccacatggctgggcgacagagtcatcaccaccagcaccagaacctgggccctgcccacttacaacaaccatctctacaagcaaatctccagccaatcaggagcttcaaacgacaaccactactttggctacagcaccccttgggggtattttgactttaacagattccactgccacttctcaccacgtgactggcagcgactcattaacaacaactggggattccggcccaagnnnctcaacttcaagctcttcaacatccaagttaaagaggtcacgcagaacgatggcacgacgactattgccaataaccttaccagcacggttcaagtgtttacggactcggagtatcagctcccgtacgtgctcgggtcggcgcaccaaggctgtctcccgccgtttccagcggacgtcttcatgatccctcagtatggatacctcaccctgaacaacggaagtcaagcggtgggacgctcatccttttactgcctggagtacttcccttcgcagatgctaaggactggaaataacttcnnnttcagctataccttcgaggatgtaccttttcacagcagctacgctcacagccagagtttggatcgcttgatgaatcctcttattgatcagtatctgtactacctgnnnagaacgcaaacaacctctggaacaacccaacaatcacggctgnnntttagccaggctgggccttcgtctatgnnncagcaggccnnnaattggctacctgggccctgctaccggcaacagagagtttcaaagactgctaacgacaacaacaacagtaactttgcttggacannngccaccaaatatcatctcaatggccgcgactcgctggtgaatccaggaccagctatggccagtcacaaggacgatgaagaaaaatttttccctatgcacggcnnnctaatatttggcaaacaagggacaggggcaagtaacgtagatttagataatgtaatgattacggatgaagaagagattcgtaccaccaatcctgtggcaacagagcagtatggaactgtggcaactaacttgcagagctcaaatacagctcccgcgactggaactgtcaatagtcagggggccttacctggcatggtgtggcaagatcgtgacgtgtaccttcaaggacctatctgggcaaagattcctcacacggatggacactttcatccttctcctctgatgggaggctttggactgaaacatccgcctcctcaaatcttgatcaaaaatactccggtaccggcaaatcctccgacgactttcagcccggccaagtttgcttcatttatcactcagtactccactggacaggtcagcgtggaaattgagtgggagctacagaaagaaaacagcaaacgttggaatccagagattcagtacacttccaactacaacaagtctgttaatgtggactttactgtagacactaatggtgtttatagtgaacctcgccctattggaacccggtatctcacacgaaacttg

SEQ ID NO: 2205 - protein, 736 aa, Artificial Sequence; identical to SEQ ID NO: 1913
  Description of Artificial Sequence: Synthetic polypeptide

SEQ ID NO: 2206 - protein, 736 aa, Artificial Sequence; identical to SEQ ID NO: 1914
  Description of Artificial Sequence: Synthetic polypeptide

SEQ ID NO: 2207 - protein, 736 aa, Artificial Sequence; identical to SEQ ID NO: 1915
  Description of Artificial Sequence: Synthetic polypeptide

SEQ ID NO: 2208 - protein, 736 aa, Artificial Sequence; identical to SEQ ID NO: 1916
  Description of Artificial Sequence: Synthetic polypeptide

SEQ ID NO: 2209 - protein, 736 aa, Artificial Sequence; identical to SEQ ID NO: 1917
  Description of Artificial Sequence: Synthetic polypeptide

SEQ ID NO: 2210 - protein, 736 aa, Artificial Sequence; identical to SEQ ID NO: 1918
  Description of Artificial Sequence: Synthetic polypeptide

SEQ ID NO: 2211 - protein, 736 aa, Artificial Sequence; identical to SEQ ID NO: 1919
  Description of Artificial Sequence: Synthetic polypeptide

SEQ ID NO: 2212 - protein, 736 aa, Artificial Sequence; identical to SEQ ID NO: 1920
  Description of Artificial Sequence: Synthetic polypeptide

SEQ ID NO: 2213 - DNA, 2211 bp, Artificial Sequence; identical to SEQ ID NO: 1921
  Description of Artificial Sequence: Synthetic polynucleotide

SEQ ID NO: 2214 - protein, 738 aa, Artificial Sequence; identical to SEQ ID NO: 7
  Description of Artificial Sequence: Synthetic polypeptide

SEQ ID NO: 2215 - protein, 738 aa, Artificial Sequence; identical to SEQ ID NO: 7
  Description of Artificial Sequence: Synthetic polypeptide

SEQ ID NO: 2216 - protein, 738 aa, Artificial Sequence
  Description of Artificial Sequence: Synthetic polypeptide
  MOD_RES (157)..(157): Xaa can be any naturally occurring amino acid
  MOD_RES (169)..(169): Xaa can be any naturally occurring amino acid
  MOD_RES (457)..(457): Xaa can be any naturally occurring amino acid
  MOD_RES (463)..(463): Xaa can be any naturally occurring amino acid
  MOD_RES (508)..(508): Xaa can be any naturally occurring amino acid
  MOD_RES (510)..(511): Xaa can be any naturally occurring amino acid
  MOD_RES (558)..(558): Xaa can be any naturally occurring amino acid
  MOD_RES (585)..(585): Xaa can be any naturally occurring amino acid
  MOD_RES (587)..(587): Xaa can be any naturally occurring amino acid
MAADGYLPDWLEDNLSEGIREWWDLKPGAPKPKANQQKQDDGRGLVLPGYKYLGPFNGLDKGEPVNAADAAALEHDKAYDQQLKAGDNPYLRYNHADAEFQERLQEDTSFGGNLGRAVFQAKKRVLEPLGLVEEGAKTAPGKKRPVEQSPQEPDSSXLGIGKTGQQPAXKRLNFGQTGDSESVPDPQPLGEPPAAPSGVGSNTMASGGGAPMADNNEGADGVGNSSGNWHCDSTWLGDRVITTSTRTWALPTYNNHLYKQISNGTSGGSTNDNTYFGYSTPWGYFDFNRFHCHFSPRDWQRLINNNWGFRPKRLNFKLFNIQVKEVTTNEGTKTIANNLTSTVQVFTDSEYQLPYVLGSAHQGCLPPFPADVFMIPQYGYLTLNNGSQAVGRSSFYCLEYFPSQMLRTGNNFQFSYTFEDVPFHSSYAHSQSLDRLMNPLIDQYLYYLSRTQTTGTXGTQTLXFSQAGPSSMANQARNWVPGPCYRQQRVSTTTNQNNNSNFAWTGAXKXXLNGRDSLMNPGVAMASHKDDEDRFFPSSGVLIFGKQGAGNDNVDYSXVMITNEEEIKTTNPVATEEYGAVATNXQXLANTQAQTGLVHNQGVLPGMVWQNRDVYLQGPIWAKIPHTDGNFHPSPLMGGFGLKHPPPQILIKNTPVPADPPTTFNQAKLNSFITQYSTGQVSVEIEWELQKENSKRWNPEIQYTSNYYKSTNVDFAVNTEGVYSEPRPIGTRYLTRNL

SEQ ID NO: 2217 - DNA, 2211 bp, Artificial Sequence
  Description of Artificial Sequence: Synthetic polynucleotide
  misc_feature (469)..(471): n is a, c, g, or t
  misc_feature (502)..(504): n is a, c, g, or t
  misc_feature (1366)..(1368): n is a, c, g, or t
  misc_feature (1384)..(1386): n is a, c, g, or t
  misc_feature (1519)..(1521): n is a, c, g, or t
  misc_feature (1525)..(1530): n is a, c, g, or t
  misc_feature (1669)..(1671): n is a, c, g, or t
  misc_feature (1750)..(1752): n is a, c, g, or t
  misc_feature (1756)..(1758): n is a, c, g, or t
atggctgccgatggttatcttccagattggctcgaggacaacctctctgagggcattcgcgagtggtgggacttgaaacctggagccccgaaacccaaagccaaccagcaaaagcaggacgacggccggggtctggtgcttcctggctacaagtacctcggacccttcaacggactcgacaagggggagcccgtcaacgcggcggacgcagcggccctcgagcacgacaaagcctacgaccagcagctcaaagcgggtgacaatccgtacctgcggtataatcacgccgacgccgagtttcaggagcgtctgcaagaagatacgtcttttgggggcaacctcgggcgagcagtcttccaggccaagaagcgggttctcgaacctctcggtctggttgaggaaggcgctaagacggctcctggaaagaagaggccggtagagcagtcgccacaagagccagactcctccnnnggcatcggcaagacaggccagcagcccgctnnnaagagactcaattttggtcagactggcgactcagagtcagtccccgacccacaacctctcggagaacctccagcagccccctcaggtgtgggatctaatacaatggcttcaggcggtggcgctccaatggcagacaataacgaaggcgccgacggagtgggtaattcctcgggaaattggcattgcgattccacatggctgggggacagagtcatcaccaccagcacccgaacctgggccctgcccacctacaacaaccacctctacaagcaaatctccaacggcacctcgggaggaagcaccaacgacaacacctattttggctacagcaccccctgggggtattttgacttcaacagattccactgtcacttttcaccacgtgactggcaacgactcatcaacaacaattggggattccggcccaaaagactcaacttcaagctgttcaacatccaggtcaaggaagtcacgacgaacgaaggcaccaagaccatcgccaataatctcaccagcaccgtgcaggtctttacggactcggagtaccagttaccgtacgtgctaggatccgctcaccagggatgtctgcctccgttcccggcggacgtcttcatgattcctcagtacggctatttaactttaaacaatggaagccaagccgtgggacgttcctccttctactgtctggagtatttcccatcgcagatgctgagaaccggcaacaactttcagttcagctacaccttcgaggacgtgcctttccacagcagctacgcgcacagccagagcctggacaggctgatgaatcccctcatcgaccagtacctgtactacctgtccagaacgcaaacgactggaactnnngggacgcagactctgnnnttcagccaagcgggtcctagctcaatggccaaccaggctagaaattgggtgcccggaccttgctaccggcagcagcgcgtctccacgacaaccaaccagaacaacaacagcaactttgcctggacgggagctnnnaagnnnnnnctgaacggccgagactctctaatgaatccgggcgtggcaatggcttcccacaaggatgacgaggaccgcttcttcccttcgagcggggtcctgatttttggcaagcaaggagccgggaacgataatgtggattacagcnnngtgatgattacaaatgaggaagaaatcaagactaccaaccccgtggccacagaagaatatggagcagtggccaccaacnnncagnnngccaatacgcaggcgcagaccggactcgtgcacaaccagggggtgcttcccggcatggtgtggcagaatagagacgtgtacctgcagggtcccatctgggccaaaattcctcacacggacggcaactttcacccgtctcccctgatgggcggctttggactgaagcacccgcctcctcaaattctcatcaagaacacaccggttccagcggacccgccgactaccttcaaccaggccaagctgaactctttcatcacgcagtacagcaccggacaggtcagcgtggaaatcgagtgggagctgcagaaagaaaacagcaaacgctggaatccagagattcaatacacttccaactactacaaatctacaaatgtggactttgctgtcaacacggagggggtttatagcgagcctcgccccattggcacccgttacctcacccgcaacctgtaa

SEQ ID NO: 2218 - protein, 733 aa, Artificial Sequence; identical to SEQ ID NO: 423
  Description of Artificial Sequence: Synthetic polypeptide

SEQ ID NO: 2219 - DNA, 4472 bp, Artificial Sequence
  Description of Artificial Sequence: Synthetic polynucleotide
ctccatcactaggggtaaccgcgaagcgcctcccacgctgccgcgtcagcgctgacgtaaattacgtcataggggagtggtcctgtattagctgtcacgtgagtgcttttgcgacattttgcgacaccacgtggccattcatggtatatatggccgagtgagcgagcaggatctccattttgaccgcgaaatttgaacgagcagcagccatgccgggcttctacgagatcgtgcttaaggtgccgagcgacctggacgagcacctgccgggcatttctgactcgtttgtgaactgggtggcagagaaggaatgggagctgcccccggattctgacatggatcggaatctgattgagcaggcacccctgaccgtggccgagaagctacagcgcgacttcctggtccaatggcgccgcgtgagtaaggccccggaggccctcttctttgttcagttcgagaagggcgagtcctacttccacctccatattctggtagagaccacgggggtcaaatccatggtgctgggccgcttcctgagtcagattcgggacaagctggtgcagaccatctaccgcgggatcgagccgaccctgcccaactggttcgcggtgacaaagacgcgtaatggcgccggaggggggaacaaggtggtggacgagtgctacatccccaactacctgctgcccaagactcagcccgagctgcagtgggcgtggactaacatggaggagtatataagcgcgtgcttgaacctggccgagcgcaaacggctcgtggcgcagcacctgacccacgtcagccagacccaggagcagaacaaggagaatctgaacccgaattctgacgcgcctgtcatccggtcaaaaacctccgcgcgctacatggagctggtcgggtggctggtggaccggggcatcacctccgagaagcagtggatccaggaggaccaggcctcgtacatctccttcaacgccgcctccaactcgcggtctcagatcaaggccgcgctggacaatgccggcaagatcatggcgctgaccaaatccgcgcccgactacctggtaggccccgctctgcccgcggacattaaatccaaccgcatctaccgcatcctggagctgaatggctacgaccctgcctacgccggttccgtctttctcggctgggcccagaaaaagtttggcaaaaggaacaccatctggctgtttgggccggccaccacgggcaagaccaacatcgcggaagccatcgcccacgccgtgcccttctacggctgcgtcaactggaccaatgagaactttcccttcaacgattgcgtcgacaagatggtgatctggtgggaggagggcaagatgacggccaaggtcgtggagtccgccaaggccattctcggcggcagcaaggtgcgcgtggaccaaaagtgcaagtcgtccgcccagatcgatcccacccccgtgatcgtcacctccaacaccaacatgtgcgccgtgattgacgggaacagcaccaccttcgagcaccagcagccgttgcaggaccggatgttcaaatttgaacttacccgccgtctggagcacgactttggcaaggtgacaaagcaggaagtcaaagagttcttccgctgggcgcaggatcacgtgaccgaggtggcgcatgagttctacgtcagaaagggtggagctaacaaaagacccgcccccgatgacgcggatataagcgagcccaagcgggcctgcccctcagtcgcggatccatcgacgtcagacgcggaaggagctccggtggactttgccgacaggtaccaaaacaaatgttctcgtcacgcgggcatgcttcagatgctgtttccctgcaaaacatgcgagagaatgaatcagaatttcaacatttgcttcacgcacgggaccagagactgttcagaatgtttccctggcgtgtcagaatctcaaccggtcgtcagaaaaaagacgtatcggaaactctgtgcgattcatcatctgctggggcgggcacccgagattgcttgctcggcctgcgacctggtcaacgtggacctggatgactgtgtttctgagcaataaatgacttaaaccaggtatggctgccgatggttatcttccagattggctcgaggacaacctctctgagggcattcgcgagtggtgggacctgaaacctggagccccgaaacccaaagccaaccagcaaaagcaggacaacggccggggtctggtgcttcctggctacaagtacctcggacccttcaacggactcgacaagggggagcccgtcaacgcggcggacgcagcggccctcgagcacgacaaggcctacgaccagcagctccaagcgggtgacaatccgtacctgcggtataatcacgccgacgccgagtttcaggagcgtctgcaagaagatacgtcttttgggggcaacctcgggcgcgcagtcttccaggccaaaaagcgggttctcgaacctctgggcctggttgaatcgccggttaagacggctcctggaaagaagagaccggtagagccatcaccccagcgctctccagactcctctacgggcatcggcaagaaaggccagcagcccgcaaaaaagagactcaattttgggcagactggcgactcagagtcagtccccgaccctcaaccaatcggagaaccaccagcaggcccctctggtctgggatctggtacaatggctgcaggcggtggcgctccaatggcagacaataacgaaggcgccgacggagtgggtagttcctcaggaaattggcattgcgattccacatggctgggcgacagagtcatcaccaccagcacccgcacctgggccctgcccacctacaacaaccacctctacaagcaaatctccaacgggacctcgggaggaagcaccaacgacaacacctacttcggctacagcaccccctgggggtattttgacttcaacagattccactgccacttttcaccacgtgactggcagcgactcatcaacaacaactggggattccggcccaagaggctcaacttcaagctcttcaacatccaagtcaaggaggtcacgcagaatgaaggcaccaagaccatcgccaataaccttaccagcacgattcaggtctttacggactcggaataccagctcccgtacgtgctcggctcggcgcaccagggctgcctgcctccgttcccggcggacgtcttcatgattcctcagtacgggtacctgactctgaacaatggcagtcaggctgtgggccggtcgtccttctactgcctggagtactttccttctcaaatgctgagaacgggcaacaactttgaattcagctacaacttcgaggacgtgcccttccacagcagctacgcgcacagccagagcctggaccggctgatgaaccctctcatcgaccagtacttgtactacctgtcccggactcaaagcacgggcggtactgcaggaactcagcagttgctattttctcaggccgggcctaacaacatgtcggctcaggccaagaactggctacccggtccctgctaccggcagcaacgcgtctccacgacactgtcgcagaacaacaacagcaactttgcctggacgggtgccaccaagtatcatctgaatggcagagactctctggtgaatcctggcgttgccatggctacccacaaggacgacgaagagcgattttttccatccagcggagtcttaatgtttgggaaacagggagctggaaaagacaacgtggactatagcagcgtgatgctaaccagcgaggaagaaataaagaccaccaacccagtggccacagaacagtacggcgtggtggccgataacctgcaacagcaaaacgccgctcctattgtaggggccgtcaatagtcaaggagccttacctggcatggtgtggcagaaccgggacgtgtacctgcagggtcccatctgggccaagattcctcatacggacggcaactttcatccctcgccgctgatgggaggctttggactgaagcatccgcctcctcagatcctgattaaaaacacacctgttcccgcggatcctccgaccaccttcactaaggccaagctggcttctttcatcacgcagtacagtaccggccaggtcagcgtggagatcgagtgggagctgcagaaggagaacagcaaacgctggaacccagagattcagtacacttccaactactacaaatctacaaatgtggactttgctgtcaatactgagggtacttattccgagcctcgccccattggcacccgttacctcacccgtaatctgtaattacatgttaatcaataaaccggttaattcgtttcagttgaactttggtctcctgtccttcttatcttatcggttaccatagaaactggttacttattaactgcttggtgcgcttcgcgataaaagacttacgtcatcgggttacccctagtgatgga

SEQ ID NO: 2220 - DNA, 2208 bp, Artificial Sequence
  Description of Artificial Sequence: Synthetic polynucleotide
atggctgccgatggttatcttccagattggctcgaggacactctctctgaaggaataagacagtggtggaagctcaaacctggcccaccaccaccaaagcccgcagagcggcataaggacgacagcaggggtcttgtgcttcctgggtacaagtacctcggacccttcaacggactcgacaagggagagccggtcaacgaggcagacgccgcggccctcgagcacgacaaagcctacgaccggcagctcgacagcggagacaacccgtacctcaagtacaaccacgccgacgcggagtttcaggagcgccttaaagaagatacgtcttttgggggcaacctcggacgagcagtcttccaggcgaaaaagagggttcttgaacctctgggcctggttgaggaacctgttaagaaggctccgggaaaaaagaggccggtagagcactctcctgtggagccagactcctcctcgggaaccggaaaggcgggccagcagcctgcaagaaaaagattgaattttggtcagactggagacgcagactcagtacctgacccccagcctctcggacagccaccagcagccccctctggtctgggaactaataccatggctacaggcagtggcgcaccaatggcagacaataacgagggtgccgacggagtgggtaattcctcgggaaattggcattgcgattccacatggatgggcgacagagtcatcaccaccagcacccgaacctgggccctgcccacctacaacaaccacctctacaaacaaatttccagccaatcaggagcctcgaacgacaatcactactttggctacagcaccccttgggggtattttgacttcaacagattccactgccacttttcaccacgtgactggcaaagactcatcaacaacaactggggattccgacccaagagactcaacttcaagctctttaacattcaagtcaaagaggtcacgcagaatgacggtacgacgacgattgccaataaccttaccagcacggttcaggtgtttactgactcggagtaccagctcccgtacgtcctcggctcggcgcatcaaggatgcctcccgccgttcccagcagacgtcttcatggtgccacagtatggatacctcaccctgaacaacgggagtcaggcagtaggacgctcttcattttactgcctggagtactttccttctcagatgctgcgtaccggaaacaactttaccttcagctacacttttgaggacgttcctttccacagcagctacgctcacagccagagtctggaccgtctcatgaatcctctcatcgaccagtacctgtattacttgagcagaacaaacactccaagtggaaccaccacgcagtcaaggcttcagttttctcaggccggagcgagtgacattcgggaccagtctaggaactggcttcctggaccctgttaccgccagcagcgagtatcaaagacatctgcggataacaacaacagtgaatactcgtggactggagctaccaagtaccacctcaatggcagagactctctggtgaatccgggcccggctatggcaagccacaaggacgatgaagaaaagttttttcctcagagcggggttctcatctttgggaagcaaggctcagagaaaacaaatgtggacattgaaaaggtcatgattacagacgaagaggaaatcaggacaaccaatcccgtggctacggagcagtatggttctgtatctaccaacctccagagaggcaacagacaagcagctaccgcagatgtcaacacacaaggcgttcttccaggcatggtctggcaggacagagatgtgtaccttcaggggcccatctgggcaaagattccacacacggacggacattttcacccctctcccctcatgggtggattcggacttaaacaccctcctccacagattctcatcaagaacaccccggtgcctgcgaatccttcgaccaccttcagtgcggcaaagtttgcttccttcatcacacagtactccacgggacaggtcagcgtggagatcgagtgggagctgcagaaggaaaacagcaaacgctggaatcccgaaattcagtacacttccaactacaacaagtctgttaatgtggactttactgtggacactaatggcgtgtattcagagcctcgccccattggcaccagatacctgactcgtaatctgtaa

SEQ ID NO: 2221 - protein, 735 aa, Artificial Sequence
  Description of Artificial Sequence: Synthetic polypeptide
MAADGYLPDWLEDTLSEGIRQWWKLKPGPPPPKPAERHKDDSRGLVLPGYKYLGPFNGLDKGEPVNEADAAALEHDKAYDRQLDSGDNPYLKYNHADAEFQERLKEDTSFGGNLGRAVFQAKKRVLEPLGLVEEPVKKAPGKKRPVEHSPVEPDSSSGTGKAGQQPARKRLNFGQTGDADSVPDPQPLGQPPAAPSGLGTNTMATGSGAPMADNNEGADGVGNSSGNWHCDSTWMGDRVITTSTRTWALPTYNNHLYKQISSQSGASNDNHYFGYSTPWGYFDFNRFHCHFSPRDWQRLINNNWGFRPKRLNFKLFNIQVKEVTQNDGTTTIANNLTSTVQVFTDSEYQLPYVLGSAHQGCLPPFPADVFMVPQYGYLTLNNGSQAVGRSSFYCLEYFPSQMLRTGNNFTFSYTFEDVPFHSSYAHSQSLDRLMNPLIDQYLYYLSRTNTPSGTTTQSRLQFSQAGASDIRDQSRNWLPGPCYRQQRVSKTSADNNNSEYSWTGATKYHLNGRDSLVNPGPAMASHKDDEEKFFPQSGVLIFGKQGSEKTNVDIEKVMITDEEEIRTTNPVATEQYGSVSTNLQRGNRQAATADVNTQGVLPGMVWQDRDVYLQGPIWAKIPHTDGHFHPSPLMGGFGLKHPPPQILIKNTPVPANPSTTFSAAKFASFITQYSTGQVSVEIEWELQKENSKRWNPEIQYTSNYNKSVNVDFTVDTNGVYSEPRPIGTRYLTRNL

SEQ ID NO: 2222 - DNA, 8376 bp, Artificial Sequence
  Description of Artificial Sequence: Synthetic polynucleotide
aattcccatcatcaataatataccttattttggattgaagccaatatgataatgagggggtggagtttgtgacgtggcgcggggcgtgggaacggggcgggtgacgtagtagtctctagagtcctgtattagaggtcacgtgagtgttttgcgacattttgcgacaccatgtggtcacgctgggtatttaagcccgagtgagcacgcagggtctccattttgaagcgggaggtttgaacgcgcagccaccacgccggggttttacgagattgtgattaaggtccccagcgaccttgacgggcatctgcccggcatttctgacagctttgtgaactgggtggccgagaaggaatgggagttgccgccagattctgacatggatctgaatctgattgagcaggcacccctgaccgtggccgagaagctgcagcgcgactttctgacggaatggcgccgtgtgagtaaggccccggaggcccttttctttgtgcaatttgagaagggagagagctacttccacatgcacgtgctcgtggaaaccaccggggtgaaatccatggttttgggacgtttcctgagtcagattcgcgaaaaactgattcagagaatttaccgcgggatcgagccgactttgccaaactggttcgcggtcacaaagaccagaaatggcgccggaggcgggaacaaggtggtggatgagtgctacatccccaattacttgctccccaaaacccagcctgagctccagtgggcgtggactaatatggaacagtatttaagcgcctgtttgaatctcacggagcgtaaacggttggtggcgcagcatctgacgcacgtgtcgcagacgcaggagcagaacaaagagaatcagaatcccaattctgatgcgccggtgatcagatcaaaaacttcagccaggtacatggagctggtcgggtggctcgtggacaaggggattacctcggagaagcagtggatccaggaggaccaggcctcatacatctccttcaatgcggcctccaactcgcggtcccaaatcaaggctgccttggacaatgcgggaaagattatgagcctgactaaaaccgcccccgactacctggtgggccagcagcccgtggaggacatttccagcaatcggatttataaaattttggaactaaacgggtacgatccccaatatgcggcttccgtctttctgggatgggccacgaaaaagttcggcaagaggaacaccatctggctgtttgggcctgcaactaccgggaagaccaacatcgcggaggccatagcccacactgtgcccttctacgggtgcgtaaactggaccaatgagaactttcccttcaacgactgtgtcgacaagatggtgatctggtgggaggaggggaagatgaccgccaaggtcgtggagtcggccaaagccattctcggaggaagcaaggtgcgcgtggaccagaaatgcaagtcctcggcccagatagacccgactcccgtgatcgtcacctccaacaccaacatgtgcgccgtgattgacgggaactcaacgaccttcgaacaccagcagccgttgcaagaccggatgttcaaatttgaactcacccgccgtctggatcatgactttgggaaggtcaccaagcaggaagtcaaagactttttccggtgggcaaaggatcacgtggttgaggtggagcatgaattctacgtcaaaaagggtggagccaagaaaagacccgcccccagtgacgcagatataagtgagcccaaacgggtgcgcgagtcagttgcgcagccatcgacgtcagacgcggaagcttcgatcaactacgcagacaggtaccaaaacaaatgttctcgtcacgtgggcatgaatctgatgctgtttccctgcagacaatgcgagagaatgaatcagaattcaaatatctgcttcactcacggacagaaagactgtttagagtgctttcccgtgtcagaatctcaacccgtttctgtcgtcaaaaaggcgtatcagaaactgtgctacattcatcatatcatgggaaaggtgccagacgcttgcactgcctgcgatctggtcaatgtggatttggatgactgcatctttgaacaataaatgatttaaatcaggtatggctgccgatggttatcttccagattggctcgaggacactctctctgaaggaataagacagtggtggaagctcaaacctggcccaccaccaccaaagcccgcagagcggcataaggacgacagcaggggtcttgtgcttcctgggtacaagtacctcggacccttcaacggactcgacaagggagagccggtcaacgaggcagacgccgcggccctcgagcacgacaaagcctacgaccggcagctcgacagcggagacaacccgtacctcaagtacaaccacgccgacgcggagtttcaggagcgccttaaagaagatacgtcttttgggggcaacctcggacgagcagtcttccaggcgaaaaagagggttcttgaacctctgggcctggttgaggaacctgttaagacggctccgggaaaaaagaggccggtagagcactctcctgtggagccagactcctcctcgggaaccggaaaggcgggccagcagcctgcaagaaaaagattgaattttggtcagactggagacgcagactcagtacctgacccccagcctctcggacagccaccagcagccccctctggtctgggaactaatacgatggctacaggcagtggcgcaccaatggcagacaataacgagggcgccgacggagtgggtaattcctcgggaaattggcattgcgattccacatggatgggcgacagagtcatcaccaccagcacccgaacctgggccctgcccacctacaacaaccacctctacaaacaaatttccagccaatcaggagcctcgaacgacaatcactactttggctacagcaccccttgggggtattttgacttcaacagattccactgccacttttcaccacgtgactggcaaagactcatcaacaacaactggggattccgacccaagagactcaacttcaagctctttaacattcaagtcaaagaggtcacgcagaatgacggtacgacgacgattgccaataaccttaccagcacggttcaggtgtttactgactcggagtaccagctcccgtacgtcctcggctcggcgcatcaaggatgcctcccgccgttcccagcagacgtcttcatggtgccacagtatggatacctcaccctgaacaacgggagtcaggcagtaggacgctcttcattttactgcctggagtactttccttctcagatgctgcgtaccggaaacaactttaccttcagctacacttttgaggacgttcctttccacagcagctacgctcacagccagagtctggaccgtctcatgaatcctctcatcgaccagtacctgtattacttgagcagaacaaacactccaagtggaaccaccacgcagtcaaggcttcagttttctcaggccggagcgagtgacattcgggaccagtctaggaactggcttcctggaccctgttaccgccagcagcgagtatcaaagacatctgcggataacaacaacagtgaatactcgtggactggagctaccaagtaccacctcaatggcagagactctctggtgaatccgggcccggccatggcaagccacaaggacgatgaagaaaagttttttcctcagagcggggttctcatctttgggaagcaaggctcagagaaaacaaatgtggacattgaaaaggtcatgattacagacgaagaggaaatcaggacaaccaatcccgtggctacggagcagtatggttctgtatctaccaacctccagagaggcaacagacaagcagctaccgcagatgtcaacacacaaggcgttcttccaggcatggtctggcaggacagagatgtgtaccttcaggggcccatctgggcaaagattccacacacggacggacattttcacccctctcccctcatgggtggattcggacttaaacaccctcctccacagattctcatcaagaacaccccggtacctgcgaatccttcgaccaccttcagtgcggcaaagtttgcttccttcatcacacagtactccacgggacaggtcagcgtggagatcgagtgggagctgcagaaggaaaacagcaaacgctggaatcccgaaattcagtacacttccaactacaacaagtctgttaatgtggactttactgtggacactaatggcgtgtattcagagcctcgccccattggcaccagatacctgactcgtaatctgtaattgcttgttaatcaataaaccgtttaattcgtttcagttgaactttggtctctgcgtatttctttcttatctagtttccatgctctagagtcctgtattagaggtcacgtgagtgttttgcgacattttgcgacaccatgtggtcacgctgggtatttaagcccgagtgagcacgcagggtctccattttgaagcgggaggtttgaacgcgcagccaccacggcggggttttacgagattgtgattaaggtccccagcgaccttgacgggcatctgcccggcatttctgacagctttgtgaactgggtggccgagaaggaatgggagttgccgccagattctgacatggatctgaatctgattgagcaggcacccctgaccgtggccgagaagctgcatcgctggcgtaatagcgaagaggcccgcaccgatcgcccttcccaacagttgcgcagcctgaatggcgaatggaattccagacgattgagcgtcaaaatgtaggtatttccatgagcgtttttcctgttgcaatggctggcggtaatattgttctggatattaccagcaaggccgatagtttgagttcttctactcaggcaagtgatgttattactaatcaaagaagtattgcgacaacggttaatttgcgtgatggacagactcttttactcggtggcctcactgattataaaaacacttctcaggattctggcgtaccgttcctgtctaaaatccctttaatcggcctcctgtttagctcccgctctgattctaacgaggaaagcacgttatacgtgctcgtcaaagcaaccatagtacgcgccctgtagcggcgcattaagcgcggcgggtgtggtggttacgcgcagcgtgaccgctacacttgccagcgccctagcgcccgctcctttcgctttcttcccttcctttctcgccacgttcgccggctttccccgtcaagctctaaatcgggggctccctttagggttccgatttagtgctttacggcacctcgaccccaaaaaacttgattagggtgatggttcacgtagtgggccatcgccctgatagacggtttttcgccctttgacgttggagtccacgttctttaatagtggactcttgttccaaactggaacaacactcaaccctatctcggtctattcttttgatttataagggattttgccgatttcggcctattggttaaaaaatgagctgatttaacaaaaatttaacgcgaattttaacaaaatattaacgtttacaatttaaatatttgcttatacaatcttcctgtttttggggcttttctgattatcaaccggggtacatatgattgacatgctagttttacgattaccgttcatcgattctcttgtttgctccagactctcaggcaatgacctgatagcctttgtagagacctctcaaaaatagctaccctctccggcatgaatttatcagctagaacggttgaatatcatattgatggtgatttgactgtctccggcctttctcacccgtttgaatctttacctacacattactcaggcattgcatttaaaatatatgagggttctaaaaatttttatccttgcgttgaaataaaggcttctcccgcaaaagtattacagggtcataatgtttttggtacaaccgatttagctttatgctctgaggctttattgcttaattttgctaattctttgccttgcctgtatgatttattggatgttggaattcctgatgcggtattttctccttacgcatctgtgcggtatttcacaccgcatatggtgcactctcagtacaatctgctctgatgccgcatagttaagccagccccgacacccgccaacacccgctgacgcgccctgacgggcttgtctgctcccggcatccgcttacagacaagctgtgaccgtctccgggagctgcatgtgtcagaggttttcaccgtcatcaccgaaacgcgcgagacgaaagggcctcgtgatacgcctatttttataggttaatgtcatgataataatggtttcttagacgtcaggtggcacttttcggggaaatgtgcgcggaacccctatttgtttatttttctaaatacattcaaatatgtatccgctcatgagacaataaccctgataaatgcttcaataatattgaaaaaggaagagtatgagtattcaacatttccgtgtcgcccttattcccttttttgcggcattttgccttcctgtttttgctcacccagaaacgctggtgaaagtaaaagatgctgaagatcagttgggtgcacgagtgggttacatcgaactggatctcaacagcggtaagatccttgagagttttcgccccgaagaacgttttccaatgatgagcacttttaaagttctgctatgtggcgcggtattatcccgtattgacgccgggcaagagcaactcggtcgccgcatacactattctcagaatgacttggttgagtactcaccagtcacagaaaagcatcttacggatggcatgacagtaagagaattatgcagtgctgccataaccatgagtgataacactgcggccaacttacttctgacaacgatcggaggaccgaaggagctaaccgcttttttgcacaacatgggggatcatgtaactcgccttgatcgttgggaaccggagctgaatgaagccataccaaacgacgagcgtgacaccacgatgcctgtagcaatggcaacaacgttgcgcaaactattaactggcgaactacttactctagcttcccggcaacaattaatagactggatggaggcggataaagttgcaggaccacttctgcgctcggcccttccggctggctggtttattgctgataaatctggagccggtgagcgtgggtctcgcggtatcattgcagcactggggccagatggtaagccctcccgtatcgtagttatctacacgacggggagtcaggcaactatggatgaacgaaatagacagatcgctgagataggtgcctcactgattaagcattggtaactgtcagaccaagtttactcatatatactttagattgatttaaaacttcatttttaatttaaaaggatctaggtgaagatcctttttgataatctcatgaccaaaatcccttaacgtgagttttcgttccactgagcgtcagaccccgtagaaaagatcaaaggatcttcttgagatcctttttttctgcgcgtaatctgctgcttgcaaacaaaaaaaccaccgctaccagcggtggtttgtttgccggatcaagagctaccaactctttttccgaaggtaactggcttcagcagagcgcagataccaaatactgtccttctagtgtagccgtagttaggccaccacttcaagaactctgtagcaccgcctacatacctcgctctgctaatcctgttaccagtggctgctgccagtggcgataagtcgtgtcttaccgggttggactcaagacgatagttaccggataaggcgcagcggtcgggctgaacggggggttcgtgcacacagcccagcttggagcgaacgacctacaccgaactgagatacctacagcgtgagctatgagaaagcgccacgcttcccgaagggagaaaggcggacaggtatccggtaagcggcagggtcggaacaggagagcgcacgagggagcttccagggggaaacgcctggtatctttatagtcctgtcgggtttcgccacctctgacttgagcgtcgatttttgtgatgctcgtcaggggggcggagcctatggaaaaacgccagcaacgcggcctttttacggttcctggccttttgctggccttttgctcacatgttctttcctgcgttatcccctgattctgtggataaccgtattaccgcctttgagtgagctgataccgctcgccgcagccgaacgaccgagcgcagcgagtcagtgagcgaggaagcggaagagcgcccaatacgcaaaccgcctctccccgcgcgttggccgattcattaatgca

SEQ ID NO: 2223 - DNA, 1085 bp, Artificial Sequence
  Description of Artificial Sequence: Synthetic polynucleotide
  misc_feature (611)..(611): n is a, c, g, or t
  misc_feature (640)..(640): n is a, c, g, or t
  misc_feature (1039)..(1039): n is a, c, g, or t
tgcccacttacaacaaccatctctacaagcaaatctccagcvvmdcaggagctascaacgacaaccactactttggctacagcaccccttgggggtattttgactttaacagattccactgccacttctcaccacgtgactggcagcgactcattaacaacaactggggattccggcccaagaaactcagcttcaagctcttcaacatccaagttagaggggtcacgcagaacgatggcacgacgactattgccaataaccttaccagcacggttcaagtgtttacggactcggagtatcagctcccgtacgtgctcgggtcggcgcaccaaggctgtctcccgccgtttccagcggacgtcttcatggtccctcagtatggatacctcaccctgaacaacggaagtcaagcggtgggacgctcatccttttactgcctggagtacttcccttcgcagatgctaaggactggaaataacttccaattcagctataccttcgaggatgtaccttttcacagcagctacgctcacagccagagtttggatcgcttgatgaatcctcttattgatcagtatctgtactacctgaacagaacgcaargcamcvcnrgcggaacarccrvcmhsmrsvvsctgvngtttagccaggctgggcctcagtctatgtctttgcaggccagaaattggctacctgggccctgctaccggcaacagagactttcaamarycbmcrvcsrsaacaacaacagtrastttccttggmcagcggccagcamatatcatctcaatggccgcgactcgctggtgaatccaggaccagctatggccagtcacrrggacgatrmsgrsaratttttccctatgcacggcaatctaatatttggcaaasaarrcrscrvsrvarvcratrycgmsdwcgrsvrsgtaatgattacggatgaagaagagattcgtaccaccaatcctgtggcaacagagcagtatggaactgtggcaaataacttgcagrvsvvsmrsrvcvvscccacgdhtvvsrnsgtcvmscatcagggggccttacctggcatggtgtggcaagatcgt

SEQ ID NO: 2224 - protein, 620 aa, Artificial Sequence
  Description of Artificial Sequence: Synthetic polypeptide
  MOD_RES (263)..(264): Xaa can be any naturally occurring amino acid
  MOD_RES (267)..(267): Xaa can be any naturally occurring amino acid
  MOD_RES (450)..(453): Xaa can be any naturally occurring amino acid
  MOD_RES (456)..(460): Xaa can be any naturally occurring amino acid
  MOD_RES (462)..(462): Xaa can be any naturally occurring amino acid
  MOD_RES (491)..(495): Xaa can be any naturally occurring amino acid
  MOD_RES (500)..(500): Xaa can be any naturally occurring amino acid
  MOD_RES (504)..(504): Xaa can be any naturally occurring amino acid
  MOD_RES (508)..(508): Xaa can be any naturally occurring amino acid
  MOD_RES (528)..(528): Xaa can be any naturally occurring amino acid
  MOD_RES (531)..(533): Xaa can be any naturally occurring amino acid
  MOD_RES (546)..(557): Xaa can be any naturally occurring amino acid
  MOD_RES (586)..(590): Xaa can be any naturally occurring amino acid
  MOD_RES (593)..(595): Xaa can be any naturally occurring amino acid
  MOD_RES (597)..(597): Xaa can be any naturally occurring amino acid
MAADGYLPDWLEDNLSEGIREWWALKPGVPQPKANQQHQDNRRGLVLPGYKYLGPGNGLDKGEPVNEADAAALEHDKAYDQQLKAGDNPYLKYNHADAEFQERLQEDTSFGGNLGRAVFQAKKRILEPLGLVEEAAKTAPGKKGAVDQSPQEPDSSSGVGKSGKQPARKRLNFGQTGDSESVPDPQPLGEPPAAPTSLGSNTMASGGGAPMADNNEGADGVGNSSGNWHCDSQWLGDRVITTSTRTWALPTYNNHLYKQISSXXGAXNDNHYFGYSTPWGYFDFNRFHCHFSPRDWQRLINNNWGFRPKKLSFKLFNIQVRGVTQNDGTTTIANNLTSTVQVFTDSEYQLPYVLGSAHQGCLPPFPADVFMVPQYGYLTLNNGSQAVGRSSFYCLEYFPSQMLRTGNNFQFSYTFEDVPFHSSYAHSQSLDRLMNPLIDQYLYYLNRTQXXXXGTXXXXXLXFSQAGPQSMSLQARNWLPGPCYRQQRLSXXXXXNNNSXFPWXAASXYHLNGRDSLVNPGPAMASHXDDXXXFFPMHGNLIFGKXXXXXXXXXXXXVMITDEEEIRTTNPVATEQYGTVANNLQXXXXXPTXXXVXHQGALPGMVWQDRDVYLQGPIWA

SEQ ID NO: 2225 - DNA, 1491 bp, Artificial Sequence
  Description of Artificial Sequence: Synthetic polynucleotide
accaccagcaccagaacctgggccctgcccacttacaacaaccatctctacaagcaaatctccagccaatcaggagcttcaaacgacaaccactactttggctacagcaccccttgggggtattttgactttaacagattccactgccacttctcaccacgtgactggcagcgactcattaacaacaactggggattccggcccaagaaactcagcttcaagctcttcaacatccaagttagaggggtcacgcagaacgatggcacgacgactattgccaataaccttaccagcacggttcaagtgtttacggactcggagtatcagctcccgtacgtgctcgggtcggcgcaccaaggctgtctcccgccgtttccagcggacgtcttcatggtccctcagtatggatacctcaccctgaacaacggaagtcaagcggtgggacgctcatccttttactgcctggagtacttcccttcgcagatgctaaggactggaaataacttccaattcagctataccttcgaggatgtaccttttcacagcagctacgctcacagccagagtttggatcgcttgatgaatcctcttattgatcagtatctgtactacctgaacagaacgcaaggaacaacctctggaacaaccaaccaatcacggctgctttttagccaggctgggcctcagtctatgtctttgcaggccagaaattggctacctgggccctgctaccggcaacagagactttcaaagactgctaacgacaacaacaacagtaactttccttggacagcggccagcaaatatcatctcaatggccgcgactcgctggtgaatccaggaccagctatggccagtcacaaggacgatgaagaaaaatttttccctatgcacggcaatctaatatttggcaaagaagggacaacggcaagtaacgcagaattagataatgtaatgattacggatgaagaagagattcgtaccaccaatcctgtggcaacagagcagtatggaactgtggcaaataacttgcagagctcaaatacagctcccacgactggaactgtcaatcatcagggggccttacctggcatggtgtggcaagatcgtgacgtctaccttcaaggacctatctgggcaaagattcctcacacggatggacactttcatccttctcctctgatgggaggctttggactgaaacatccgcctcctcaaatcatgatcaaaaatactccggtaccggcaaatcctccgacgactttcagcccggccaagtttgcttcatttatcactcagtactccactggacaggtcagcgtggaaattgagtgggagctacagaaagaaaacagcaaacgttggaatccagagattcagtacacttccaactacaacaagtctgttaatgtggactttactgtagacactaatggtgtttatagtgaacctcgccctattggaacccggtatctcacacgaaacttgtga

SEQ ID NO: 2226 - protein, 482 aa, Artificial Sequence
  Description of Artificial Sequence: Synthetic polypeptide
TTSTRTWALPTYNNHLYKQISSQSGASNDNHYFGYSTPWYFDFNRFHCHFSPRDWQRLNNNWGFRPKKLSFKLFNIQRGVTQNDGTTTIANNLTSTQVFTDSEYQLPYVLGSAHQCLPPFPADVFMVPQYGYLTNNGSQAVGRSSFYCLEYFPQMLRTGNNFQFSYTFEDVPHSSYAHSQSLDRLMNPLIDYLYYLNRTQGTTSGTTNQSLLFSQAGPQSMSLQARNWLGPCYRQQRLSKTANDNNNSFPWTAASKYHLNGRDSLVNGPAMASHKDDEEKFFPMHGLIFGKEGTTASNAELDNVMITDEEEIRTTNPVATEQYGTVANNLQSSNTAPTTGTVNHQGALPGMVWQDRDVYLQGPIWAKIPHTDGHFHPSPLMGGFGLKHPPPQIMIKNTPVPANPPTTFSPAKFASFITQYSTGQVSVEIEWELQKENSKRWNPEIQYTSNYNKSVNVDFTVDTNGVYSEPRPIGTRYLTRNL

SEQ ID NO: 2227 - DNA, 1140 bp, Artificial Sequence
  Description of Artificial Sequence: Synthetic polynucleotide
  misc_feature (636)..(636): n is a, c, g, or t
  misc_feature (665)..(665): n is a, c, g, or t
  misc_feature (1064)..(1064): n is a, c, g, or t
accaccagcaccagaacctgggccctgcccacttacaacaaccatctctacaagcaaatctccagcvvmdcaggagctascaacgacaaccactactttggctacagcaccccttgggggtattttgactttaacagattccactgccacttctcaccacgtgactggcagcgactcattaacaacaactggggattccggcccaagaaactcagcttcaagctcttcaacatccaagttagaggggtcacgcagaacgatggcacgacgactattgccaataaccttaccagcacggttcaagtgtttacggactcggagtatcagctcccgtacgtgctcgggtcggcgcaccaaggctgtctcccgccgtttccagcggacgtcttcatggtccctcagtatggatacctcaccctgaacaacggaagtcaagcggtgggacgctcatccttttactgcctggagtacttcccttcgcagatgctaaggactggaaataacttccaattcagctataccttcgaggatgtaccttttcacagcagctacgctcacagccagagtttggatcgcttgatgaatcctcttattgatcagtatctgtactacctgaacagaacgcaargcamcvcnrgcggaacarccrvcmhsmrsvvsctgvngtttagccaggctgggcctcagtctatgtctttgcaggccagaaattggctacctgggccctgctaccggcaacagagactttcaamarycbmcrvcsrsaacaacaacagtrastttccttggmcagcggccagcamatatcatctcaatggccgcgactcgctggtgaatccaggaccagctatggccagtcacrrggacgatrmsgrsaratttttccctatgcacggcaatctaatatttggcaaasaarrcrscrvsrvarvcratrycgmsdwcgrsvrsgtaatgattacggatgaagaagagattcgtaccaccaatcctgtggcaacagagcagtatggaactgtggcaaataacttgcagrvsvvsmrsrvcvvscccacgdhtvvsrnsgtcvmscatcagggggccttacctggcatggtgtggcaagatcgtgacgtctaccttcaaggacctatctgggca

SEQ ID NO: 2228 - protein, 620 aa, Artificial Sequence; identical to SEQ ID NO: 2224
  Description of Artificial Sequence: Synthetic polypeptide
  MOD_RES (263)..(264): Xaa can be any naturally occurring amino acid
  MOD_RES (267)..(267): Xaa can be any naturally occurring amino acid
  MOD_RES (450)..(453): Xaa can be any naturally occurring amino acid
  MOD_RES (456)..(460): Xaa can be any naturally occurring amino acid
  MOD_RES (462)..(462): Xaa can be any naturally occurring amino acid
  MOD_RES (491)..(495): Xaa can be any naturally occurring amino acid
  MOD_RES (500)..(500): Xaa can be any naturally occurring amino acid
  MOD_RES (504)..(504): Xaa can be any naturally occurring amino acid
  MOD_RES (508)..(508): Xaa can be any naturally occurring amino acid
  MOD_RES (528)..(528): Xaa can be any naturally occurring amino acid
  MOD_RES (531)..(533): Xaa can be any naturally occurring amino acid
  MOD_RES (546)..(557): Xaa can be any naturally occurring amino acid
  MOD_RES (586)..(590): Xaa can be any naturally occurring amino acid
  MOD_RES (593)..(595): Xaa can be any naturally occurring amino acid
  MOD_RES (597)..(597): Xaa can be any naturally occurring amino acid

SEQ ID NO: 2229 - protein, 738 aa, Artificial Sequence; identical to SEQ ID NO: 7
  Description of Artificial Sequence: Synthetic polypeptide

SEQ ID NO: 2230 - DNA, 2258 bp, Artificial Sequence
  Description of Artificial Sequence: Synthetic polynucleotide
tcgaggacaacctctctgagggcattcgcgagtggtgggacttgaaacctggagccccgaaacccaaagccaaccagcaaaagcaggacgacggccggggtctggtgcttcctggctacaagtacctcggacccttcaacggactcgacaagggggagcccgtcaacgcggcggacgcagcggccctcgagcacgacaaggcctacgaccagcagctcaaagcgggtgacaatccgtacctgcggtataaccacgccgacgccgagtttcaggagcgtctgcaagaagatacgtcttttgggggcaacctcgggcgagcagtcttccaggccaagaagcgggttctcgaacctctcggtctggttgaggaaggcgctaagacggctcctggaaagaagagaccggtagagccatcaccccagcgttctccagactcctctacgggcatcggcaagaaaggccagcagcccgcgaaaaagagactcaactttgggcagactggcgactcagagtcagtgcccgaccctcaaccaatcggagaaccccccgcaggcccctctggtctgggatctggtacaatggctgcaggcggtggcgctccaatggcagacaataacgaaggcgccgacggagtgggtagttcctcaggaaattggcattgcgattccacatggctgggcgacagagtcatcaccaccagcacccgaacctgggccctccccacctacaacaaccacctctacaagcaaatctccaacgggacttcgggaggaagcaccaacgacaacacctacttcggctacagcaccccctgggggtattttgactttaacagattccactgccacttctcaccacgtgactggcagcgactcatcaacaacaactggggattccggcccaagagactcaacttcaagctcttcaacatccaggtcaaggaggtcacgcagaatgaaggcaccaagaccatcgccaataaccttaccagcacgattcaggtctttacggactcggaataccagctcccgtacgtcctcggctctgcgcaccagggctgcctgcctccgttcccggcggacgtcttcatgattcctcagtacgggtacctgactctgaacaatggcagtcaggccgtgggccgttcctccttctactgcctggagtactttccttctcaaatgctgagaacgggcaacaactttgagttcagctaccagtttgaggacgtgccttttcacagcagctacgcgcacagccaaagcctggaccggctgatgaaccccctcatcgaccagtacctgtactacctgtctcggactcagtccacgggaggtaccgcaggaactcagcagttgctattttctcaggccgggcctaataacatgtcggctcaggccaaaaactggctacccgggccctgctaccggcagcaacgcgtctccacgacactgtcgcaaaataacaacagcaactttgcctggaccggtgccaccaagtatcatctgaatggcagagactctctggtaaatcccggtgtcgctatggcaacccacaaggacgacgaagagcgattttttccgtccagcggagtcttaatgtttgggaaacagggagctggaaaagacaacgtggactatagcagcgttatgctaaccagtgaggaagaaattaaaaccaccaacccagtggccacagaacagtacggcgtggtggccgataacctgcaacagcaaaacgccgctcctattgtaggggccgtcaacagtcaaggagccttacctggcatggtctggcagaaccgggacgtgtacctgcagggtcctatctgggccaagattcctcacacggacggaaactttcatccctcgccgctgatgggaggctttggactgaaacacccgcctcctcagatcctgattaagaatacacctgttcccgcggatcctccaactaccttcagtcaagctaagctggcgtcgttcatcacgcagtacagcaccggacaggtcagcgtggaaattgaatgggagctgcagaaagaaaacagcaaacgctggaacccagagattcaatacacttccaactactacaaatctacaaatgtggactttgctgttaacacagatggcacttattctgagcctcgccccatcggcacccgttacctcacccgtaatctgtaattgcttgttaatcaataaaccggttgattcgtttcagttgaactttggtctctgcgaagggcgaattcgttt

SEQ ID NO: 2231 - DNA, 2208 bp, Artificial Sequence
  Description of Artificial Sequence: Synthetic polynucleotide
atggctgccgatggttatcttccagattggctcgaggacactctctctgaaggaataagacagtggtggaagctcaaacctggcccaccaccaccaaagcccgcagagcggcataaggacgacagcaggggtcttgtgcttcctgggtacaagtacctcggacccttcaacggactcgacaagggagagccggtcaacgaggcagacgccgcggccctcgagcacgacaaagcctacgaccggcagctcgacagcggagacaacccgtacctcaagtacaaccacgccgacgcggagtttcaggagcgccttaaagaagatacgtcttttgggggcaacctcggacgagcagtcttccaggcgaaaaagagggttcttgaacctctgggcctggttgaggaacctgttaagacggctccgggaaaaaagaggccggtagagcactctcctgtggagccagactcctcctcgggaaccggaaaggcgggccagcagcctgcaagaaaaagattgaattttggtcagactggagacgcagactcagtacctgacccccagcctctcggacagccaccagcagccccctctggtctgggaactaatacgatggctacaggcagtggcgcaccaatggcagacaataacgagggcgccgacggagtgggtaattcctcgggaaattggcattgcgattccacatggatgggcgacagagtcatcaccaccagcacccgaacctgggccctgcccacctacaacaaccacctctacaaacaaatttccagccaatcaggagcctcgaacgacaatcactactttggctacagcaccccttgggggtattttgacttcaacagattccactgccacttttcaccacgtgactggcaaagactcatcaacaacaactggggattccgacccaagagactcaacttcaagctctttaacattcaagtcaaagaggtcacgcagaatgacggtacgacgacgattgccaataaccttaccagcacggttcaggtgtttactgactcggagtaccagctcccgtacgtcctcggctcggcgcatcaaggatgcctcccgccgttcccagcagacgtcttcatggtgccacagtatggatacctcaccctgaacaacgggagtcaggcagtaggacgctcttcattttactgcctggagtactttccttctcagatgctgcgtaccggaaacaactttaccttcagctacacttttgaggacgttcctttccacagcagctacgctcacagccagagtctggaccgtctcatgaatcctctcatcgaccagtacctgtatttcttaagcagaacaaacactccaagtggaaccaccacgcagtcaaggcttcagttttctcaggccggagcgagtgacattcgggaccagtctaggaactggcttcctggaccctgttaccgccagcagcgagtatcaaagacatctgcggataacaacaacagtgaattctcgtggaccggtgctaccaagtaccacctcaatggcagagactctctggtgaatccgggcccggccatggcaagccacaaggacgatgaagaaaagttttttcctcagagcggggttctcatctttgggaagcaaggctcagagaaaacaaatgtggacattgaaaaggtcatgattacagacgaagaggaaatcaggacaaccaatcccgtggctacggagcagtatggttctgtatctaccaacctccagagaggcaacagacaagcagctaccgcagatgtcaacacacaaggcgttcttccaggcatggtctggcaggacagagatgtgtaccttcaggggcccatctgggcaaagattccacacacggacggacattttcacccctctcccctcatgggtggattcggacttaaacaccctcctccacagattctcatcaagaacaccccggtacctgcgaatccttcgaccaccttcagtgcggcaaagtttgcttccttcatcacacagtactccacgggacaggtcagcgtggagatcgagtgggagctgcagaaggaaaacagcaaacgctggaatcccgaaattcagtacacttccaactacaacaagtctgttaatgtggactttactgtggacactaatggcgtgtattcagagcctcgccccattggtaccagattcctgactcgtaatctgtaa

SEQ ID NO: 2232 - protein, 737 aa, Artificial Sequence
  Description of Artificial Sequence: Synthetic polypeptide
MAADGYLPDWLEDNLSEGIREWWDLKPGAPKPKANQQKQDNGRGLVLPGYKYLGPFNGLDKGEPVNAADAAALEHDKAYDQQLQAGDNPYLRYNHADAEFQERLQEDTSFGGNLGRAVFQAKKRVLEPLGLVESPVKTAPGKKRPVEPSPQRSPDSSTGIGKKGQQPAKKRLNFGQTGDSESVPDPQPIGEPPAAPSGVGPNTMAAGGGAPMADNNEGADGVGSSSGNWHCDSTWLGDRVITTSTRTWALPTYNNHLYKQISNGTSGGSTNDNTYFGYSTPWGYFDFNRFHCHFSPRDWQRLINNNWGFRPKRLNFKLFNIQVKEVTQNEGTKTIANNLTSTIQVFTDSEYQLPYVLGSAHQGCLPPFPADVFMIPQYGYLTLNNGSQAVGRSSFYCLEYFPSQMLRTGNNFEFSYNFEDVPFHSSYAHSQSLDRLMNPLIDQYLYYLSRTQSTGGTAGTQQLLFSQAGPNNMSAQAKNWLPGPCYRQQRVSTTLSQNNNSNFAWTGATKYHLNGRDSLVNPGVAMATHKDDEERFFPSSGVLMFGKQGAGKDNVDYSSVMLTSEEEIKTTNPVATEQYGWADNLQQQNAAPIVGAVNSQGALPGMVWQNRDVYLQGPIWAKIPHTDGNFHPSPLMGGFGLKHPPPQILIKNTPVPADPPTTFNQAKLASFITQYSTGQVSVEIEWELQKENSKRWNPEIQYTSNYYKSTNVDFAVNTEGTYSEPRPIGTRYLTRNL

SEQ ID NO: 2233 - DNA, 2211 bp, Artificial Sequence
  Description of Artificial Sequence: Synthetic polynucleotide
atggctgccgatggttatcttccagattggctcgaggacactctctctgaaggaataagacagtggtggaagctcaaacctggcccaccaccaccaaagcccgcagagcggcataaggacgacagcaggggtcttgtgcttcctgggtacaagtacctcggacccttcaacggactcgacaagggagagccggtcaacgaggcagacgccgcggccctcgagcacgacaaagcctacgaccggcagctcgacagcggagacaacccgtacctcaagtacaaccacgccgacgcggagtttcaggagcgccttaaagaagatacgtcttttgggggcaacctcggacgagcagtcttccaggcgaaaaagagggttcttgaacctctgggcctggttgaggaacctgttaagacggctccgggaaaaaagaggccggtagagcactctcctgtggagccagactcctcctcgggaaccggaaaggcgggccagcagcctgcaagaaaaagattgaattttggtcagactggagacgcagactcagtacctgacccccagcctctcggacagccaccagcagccccctctggtctgggaactaatacgatggctacaggcagtggcgcaccaatggcagacaataacgagggcgccgacggagtgggtaattcctcgggaaattggcattgcgattccacatggatgggcgacagagtcatcaccaccagcacccgaacctgggccctgcccacctacaacaaccacctctacaaacaaatttccagcgcttcaacgggagcctcgaacgacaatcactactttggctacagcaccccttgggggtattttgacttcaacagattccactgccacttttcaccacgtgactggcaaagactcatcaacaacaactggggattccgacccaagagactcaacttcaagctctttaacattcaagtcaaagaggtcacgcagaatgacggtacgacgacgattgccaataaccttaccagcacggttcaggtgtttactgactcggagtaccagctcccgtacgtcctcggctcggcgcatcaaggatgcctcccgccgttcccagcagacgtcttcatggtgccacagtatggatacctcaccctgaacaacgggagtcaggcagtaggacgctcttcattttactgcctggagtactttccttctcagatgctgcgtaccggaaacaactttaccttcagctacacttttgaggacgttcctttccacagcagctacgctcacagccagagtctggaccgtctcatgaatcctctcatcgaccagtacctgtattacttgagcagaacaaacactccaagtggaaccaccacgcagtcaaggcttcagttttctcaggccggagcgagtgacattcgggaccagtctaggaactggcttcctggaccctgttaccgccagcagcgagtatcaaagacatctgcggataacaacaacagtgaatactcgtggactggagctaccaagtaccacctcaatggcagagactctctggtgaatccgggcccggccatggcaagccacaaggacgatgaagaaaagttttttcctcagagcggggttctcatctttgggaagcaaggctcagagaaaacaaatgtggacattgaaaaggtcatgattacagacgaagaggaaatcaggacaaccaatcccgtggctacggagcagtatggttctgtatctaccaacctccagagaggcaacagacaagcagctaccgcagatgtcaacacacaaggcgttcttccaggcatggtctggcaggacagagatgtgtaccttcaggggcccatctgggcaaagattccacacacggacggacattttcacccctctcccctcatgggtggattcggacttaaacaccctcctccacagattctcatcaagaacaccccggtacctgcgaatccttcgaccaccttcagtgcggcaaagtttgcttccttcatcacacagtactccacgggacaggtcagcgtggagatcgagtgggagctgcagaaggaaaacagcaaacgctggaatcccgaaattcagtacacttccaactacgccaagtctgtcaatgtggactttactgtggacaataatggcgtgtattcagagcctcgccccattggcaccagatacctgactcgtaatctgtaa

SEQ ID NO: 2234 - DNA, 2208 bp, Artificial Sequence
  Description of Artificial Sequence: Synthetic polynucleotide
atggctgccgatggttatcttccagattggctcgaggacaacctctctgagggcattcgcgagtggtgggacttgaaacctggagccccgaagcccaaagccaaccagcaaaagcaggacgacggccggggtctggtgcttcctggctacaagtacctcggacccttcaacggactcgacaagggggagcccgtcaacgcggcggacgcagcggccctcgagcacgacaaggcctacgaccagcagctcaaagcgggtgacaatccgtacctgcggtataaccacgccgacgccgagtttcaggagcgtctgcaagaagatacgtcttttgggggcaacctcgggcgagcagtcttccaggccaagaagcgggttctcgaacctctcggtctggttgaggaaggcgctaagacggctcctggaaagaaacgtccggtagagcagtcgccacaagagccagactcctcctcgggcatcggcaagacaggccagcagcccgctaaaaagagactcaattttggtcagactggcgactcagagtcagtccccgatccacaacctctcggagaacctccagcaacccccgctgctgtgggacctactacaatggcttcaggcggtggcgcaccaatggcagacaataacgaaggcgccgacggagtgggtaatgcctcaggaaattggcattgcgattccacatggctgggcgacagagtcatcaccaccagcacccgcacctgggccttgcccacctacaataaccacctctacaagcaaatctccagtgcttcaggggccagcaacgacaaccactacttcggctacagcaccccctgggggtattttgatttcaacagattccactgccacttttcaccacgtgactggcagcgactcatcaacaacaattggggattccggcccaagagactcaacttcaaactcttcaacatccaagtcaaggaggtcacgacgaatgatggcgtcacaaccatcgctaataaccttaccagcacggttcaagtcttctcggactcggagtaccagcttccgtacgtcctcggctctgcgcaccagggctgcctccctccgttcccggcggacgtgttcatgattccgcaatacggctacctgacgctcaacaatggcagccaagccgtgggacgttcatccttttactgcctggaatatttcccttctcagatgctgagaacgggcaacaactttaccttcagctacacctttgaggaagtgcctttccacagcagctacgcgcacagccagagcctggaccggctgatgaatcctctcatcgaccaatacctgtattacctgaacagaactcaaaatcagtccggaagtgcccaaaacaaggacttgctgtttagccgtgggtctccagctggcatgtctgttcagcccaaaaactggctacctggaccctgttatcggcagcagcgcgtttctaaaacaaaaacagacaacaacaacagcaattttacctggactggtgcttcaaaatataacctcaatgggcgtgaatccatcatcaaccctggcactgctatggcctcacacaaagacgacgaagacaagttctttcccatgagcggtgtcatgatttttggaaaagagagcgccggagcttcaaacactgcattggacaatgtcatgattacagacgaagaggaaattaaagccactaaccctgtggccaccgaaagatttgggaccgtggcagtcaatttccagagcagcagcacagaccctgcgaccggagatgtgcatgctatgggagcattacctggcatggtgtggcaagatagagacgtgtacctgcagggtcccatttgggccaaaattcctcacacagatggacactttcacccgtctcctcttatgggcggctttggactcaagaacccgcctcctcagatcctcatcaaaaacacgcctgttcctgcgaatcctccggcggagttttcagctacaaagtttgcttcattcatcacccaatactccacaggacaagtgagtgtggaaattgaatgggagctgcagaaagaaaacagcaagcgctggaatcccgaagtgcagtacacatccaattatgcaaaatctgccaacgttgattttactgtggacaacaatggactttatactgagcctcgccccattggcacccgttaccttacccgtcccctgtaa

SEQ ID NO: 2235 - DNA, 2205 bp, Artificial Sequence
  Description of Artificial Sequence: Synthetic polynucleotide
atggctgccgatggttatcttccagattggctcgaggacaacctctdgagggcattcgcgagtggtgggacttgaaacctggagccccgaaacccaaagccaaccagcaaaagcaggacgacggccggggtdggtgcttcctggctacaagtacctcggacccttcaacggactcgacaagggggagcccgtcaacgcggcggatgcagcggccctcgagcacgacaaggcctacgaccagcagctcaaagcgggtgacaatccgtacctgcggtataaccacgccgacgccgagtttcaggagcgtctgcaagaagatacgtcttttgggggcaacctcgggcgagcagtcttccaggccaagaagagggttctcgaaccttttggtdggttgaggaaggtgctaagacggctcctggaaagaaacgtccggtagagcagtcgccacaagagccagactcctcctcgggcattggcaagacaggccagcagcccgctaaaaagagactcaattttggtcagactggcgactcagagtcagtccccgacccacaacctctcggagaacctccagcaacccccgctgctgtgggacctactacaatggcttcaggcggtggcgcaccaatggcagacaataacgaaggcgccgacggagtgggtaatgcctcaggaaattggcattgcgattccacatggctgggcgacagagtcatcaccaccagcacccgaacatgggccttgcccacctataacaaccacctctacaagcaaatctccagtgcttcaggggccagcaacgacaaccactacttcggctacagcaccccctgggggtattttgatttcaacagattccactgccatttctcaccacgtgactggcagcgactcatcaacaacaattggggattccggcccaagagactcaacttcaagctcttcaacatccaagtcaaggaggtcacgacgaatgatggcgtcacgaccatcgctaataaccttaccagcacggttcaagtcttctcggactcggagtaccagttgccgtacgtcctcggctctgcgcaccagggctgcctccctccgttcccggcggacgtgttcatgattccgcagtacggctacctaacgctcaacaatggcagccaggcagtgggacggtcatccttttactgcctggaatatttcccatcgcagatgctgagaacgggcaataactttaccttcagctacaccttcgaggacgtgcctttccacagcagctacgcgcacagccagagcctggaccggctgatgaatcctctcatcgaccagtacctgtattacctgaacagaactcagaatcagtccggaagtgcccaaaacaaggacttgctgtttagccgggggtctccagctggcatgtctgttcagcccaaaaactggctacctggaccctgttaccggcagcagcgcgtttctaaaacaaaaacagacaacaacaacagcaactttacctggactggtgcttcaaaatataaccttaatgggcgtgaatctataatcaaccctggcactgctatggcctcacacaaagacgacaaagacaagttctttcccatgagcggtgtcatgatttttggaaaggagagcgccggagcttcaaacactgcattggacaatgtcatgatcacagacgaagaggaaatcaaagccactaaccccgtggccaccgaaagatttgggactgtggcagtcaatctccagagcagcagcacagaccctgcgaccggagatgtgcatgttatgggagccttacctggaatggtgtggcaagacagagacgtatacctgcagggtcctatttgggccaaaattcctcacacggatggacactttcacccgtctcctctcatgggcggctttggacttaagcacccgcctcctcagatcctcatcaaaaacacgcctgttcctgcgaatcctccggcagagttttcggctacaaagtttgcttcattcatcacccagtattccacaggacaagtgagcgtggagattgaatgggagctgcagaaagaaaacagcaaacgctggaatcccgaagtgcagtatacatctaactatgcaaaatctgccaacgttgatttcactgtggacaacaatggactttatactgagcctcgccccattggcacccgttacctcacccgtcccctgtaa

SEQ ID NO: 2236 - DNA, 2208 bp, Artificial Sequence
  Description of Artificial Sequence: Synthetic polynucleotide
atggctgccgatggttatcttccagattggctcgaggacaacctctctgagggcattcgcgagtggtgggacttgaaacctggagccccgaaacccaaagccaaccagcaaaagcaggacgacggccggggtctggtgcttcctggctacaagtacctcggacccttcaacggactcgacaagggggagcccgtcaacgcggcggatgcagcggccctcgagcacgacaaggcctacgaccagcagctcaaagcgggtgacaatccgtacctgcggtataaccacgccgacgccgagtttcaggagcgtctgcaagaagatacgtcttttgggggcaacctcgggcgagcagtcttccaggccaagaagagggttctcgaaccttttggtctggttgaggaaggtgctaagacggctcctggaaagaaacgtccggtagagcagtcgccacaagagccagactcctcctcgggcattggcaagacaggccagcagcccgctaaaaagagactcaattttggtcagactggcgactcagagtcagtccccgacccacaacctctcggagaacctccagcaacccccgctgctgtgggacctactacaatggcttcaggcggtggcgcaccaatggcagacaataacgaaggcgccgacggagtgggtaatgcctcaggaaattggcattgcgattccacatggctgggcgacagagtcatcaccaccagcacccgaacatgggccttgcccacctataacaaccacctctacaagcaaatctccagtgcttcaggggccagcaacgacaaccactacttcggctacagcaccccctgggggtattttgatttcaacagattccactgccatttctcaccacgtgactggcagcgactcatcaacaacaattggggattccggcccaagagactcaacttcaagctcttcaacatccaagtcaaggaggtcacgacgaatgatggcgtcacgaccatcgctaataaccttaccagcacggttcaagtcttctcggactcggagtaccagttgccgtacgtcctcggctctgcgcaccagggctgcctccctccgttcccggcggacgtgttcatgattccgcagtacggctacctaacgctcaacaatggcagccaggcagtgggacggtcatccttttactgcctggaatatttcccatcgcagatgctgagaacgggcaataactttaccttcagctacaccttcgaggacgtgcctttccacagcagctacgcgcacagccagagcctggaccggctgatgaatcctctcatcgaccagtacctgtattacctgaacagaactcagaatcagtccggaagtgcccaaaacaaggacttgctgtttagccgggggtctccagctggcatgtctgttcagcccaaaaactggctacctggaccctgttaccggcagcagcgcgtttctaaaacaaaaacagacaacaacaacagcaactttacctggactggtgcttcaaaatataaccttaatgggcgtgaatctataatcaaccctggcactgctatggcctcacacaaagacgacgaagacaagttctttcccatgagcggtgtcatgatttttggaaaggagagcgccggagcttcaaacactgcattggacaatgtcatgatcacagacgaagaggaaatcaaagccactaaccccgtggccaccgaaagatttgggactgtggcagtcaatctccagagcagcagcacagaccctgcgaccggagatgtgcatgttatgggagccttacctggaatggtgtggcaagacagagacgtatacctgcagggtcctatttgggccaaaattcctcacacggatggacactttcacccgtctcctctcatgggcggctttggacttaagcacccgcctcctcagatcctcatcaaaaacacgcctgttcctgcgaatcctccggcagagttttcggctacaaagtttgcttcattcatcacccagtattccacaggacaagtgagcgtggagattgaatgggagctgcagaaagaaaacagcaaacgctggaatcccgaagtgcagtatacatctaactatgcaaaatctgccaacgttgatttcactgtggacaacaatggactttatactgagcctcgccccattggcacccgttacctcacccgtcccctgtaa

SEQ ID NO: 2237 - DNA, 2208 bp, Artificial Sequence
  Description of Artificial Sequence: Synthetic polynucleotide
atggctgccgatggttatcttccagattggctcgaggacactctctctgaaggaataagacagtggtggaagctcaaacctggcccaccaccaccaaagcccgcagagcggcataaggacgacagcaggggtcttgtgcttcctgggtacaagtacctcggacccttcaacggactcgacaagggagagccggtcaacgaggcagacgccgcggccctcgagcacgacaaagcctacgaccggcagctcgacagcggagacaacccgtacctcaagtacaaccacgccgacgcggagtttcaggagcgccttaaagaagatacgtcttttgggggcaacctcggacgagcagtcttccaggcgaaaaagagggttcttgaacctctgggcctggttgaggaacctgttaagacggctccgggaaaaaagaggccggtagagcactctcctgtggagccagactcctcctcgggaaccggaaaggcgggccagcagcctgcaagaaaaagattgaattttggtcagactggagacgcagactcagtacctgacccccagcctctcggacagccaccagcagccccctctggtctgggaactaatacgatggctacaggcagtggcgcaccaatggcagacaataacgagggcgccgacggagtgggtaattcctcgggaaattggcattgcgattccacatggatgggcgacagagtcatcaccaccagcacccgaacctgggccctgcccacctacaacaaccacctctacaaacaaatttccagccaatcaggagcctcgaacgacaatcactactttggctacagcaccccttgggggtattttgacttcaacagattccactgccacttttcaccacgtgactggcaaagactcatcaacaacaactggggattccgacccaagagactcaacttcaagctctttaacattcaagtcaaagaggtcacgcagaatgacggtacgacgacgattgccaataaccttaccagcacggttcaggtgtttactgactcggagtaccagctcccgtacgtcctcggctcggcgcatcaaggatgcctcccgccgttcccagcagacgtcttcatggtgccacagtatggatacctcaccctgaacaacgggagtcaggcagtaggacgctcttcattttactgcctggagtactttccttctcagatgctgcgtaccggaaacaactttaccttcagctacacttttgaggacgttcctttccacagcagctacgctcacagccagagtctggaccgtctcatgaatcctctcatcgaccagtacctgtattacttgagcagaacaaacactccaagtggaaccaccacgcagtcaaggcttcagttttctgtggccggacccagtaacatggctgtccagggaaggaactggcttcctggaccctgttaccgccagcagcgagtatcaaagacatctgcggataacaacaacagtgaatttgcttggactggagctaccaagtaccacctcaatggcagagactctctggtgaatccgggcccggccatggcaagccacaaggacgatgaagaaaagttttttcctcagagcggggttctcatctttgggaagcaaggctcagagaaaacaaatgtggacattgaaaaggtcatgattacagacgaagaggaaatcaggacaaccaatcccgtggctacggagcagtatggttctgtatctaccaacctccagcaacagaacacagcaccagctaccgcagatgtcaacacacaaggcgttcttccaggcatggtctggcaggacagagatgtgtaccttcaggggcccatctgggcaaagattccacacacggacggacattttcacccctctcccctcatgggtggattcggacttaaacaccctcctccacagattctcatcaagaacaccccggtacctgcgaatccttcgaccaccttcagtgcggcaaagtttgcttccttcatcacacagtactccacgggacaggtcagcgtggagatcgagtgggagctgcagaaggaaaacagcaaacgctggaatcccgaaattcagtacacttccaactacaacaagtctgttaatgtggactttactgtggacactaatggcgtgtattcagagcctcgccccattggcaccagatacctgactcgtaatctgtaa

SEQ ID NO: 2238 - protein, 735 aa, Artificial Sequence
  Description of Artificial Sequence: Synthetic polypeptide
MAADGYLPDWLEDTLSEGIRQWWKLKPGPPPPKPAERHKDDSRGLVLPGYKYLGPFNGLDKGEPVNEADAAALEHDKAYDRQLDSGDNPYLKYNHADAEFQERLKEDTSFGGNLGRAVFQAKKRVLEPLGLVEEPVKTAPGKKRPVEHSPVEPDSSSGTGKAGQQPARKRLNFGQTGDADSVPDPQPLGQPPAAPSGLGTNTMATGSGAPMADNNEGADGVGNSSGNWHCDSTWMGDRVITTSTRTWALPTYNNHLYKQISSQSGASNDNHYFGYSTPWGYFDFNRFHCHFSPRDWQRLINNNWGFRPKRLNFKLFNIQVKEVTQNDGTTTIANNLTSTVQVFTDSEYQLPYVLGSAHQGCLPPFPADVFMVPQYGYLTLNNGSQAVGRSSFYCLEYFPSQMLRTGNNFTFSYTFEDVPFHSSYAHSQSLDRLMNPLIDQYLYYLSRTNTPSGTTTQSRLQFSVAGPSNMAVQGRNWLPGPCYRQQRVSKTSADNNNSEFAWTGATKYHLNGRDSLVNPGPAMASHKDDEEKFFPQSGVLIFGKQGSEKTNVDIEKVMITDEEEIRTTNPVATEQYGSVSTNLQQQNTAPATADVNTQGVLPGMVWQDRDVYLQGPIWAKIPHTDGHFHPSPLMGGFGLKHPPPQILIKNTPVPANPSTTFSAAKFASFITQYSTGQVSVEIEWELQKENSKRWNPEIQYTSNYNKSVNVDFTVDTNGVYSEPRPIGTRYLTRNL

SEQ ID NO: 2239 - DNA, 2208 bp, Artificial Sequence
  Description of Artificial Sequence: Synthetic polynucleotide
atggctgccgatggttatcttccagattggctcgaggacactctctctgaaggaataagacagtggtggaagctcaaacctggcccaccaccaccaaagcccgcagagcggcataaggacgacagcaggggtcttgtgcttcctgggtacaagtacctcggacccttcaacggactcgacaagggagagccggtcaacgaggcagacgccgcggccctcgagcacgacaaagcctacgaccggcagctcgacagcggagacaacccgtacctcaagtacaaccacgccgacgcggagtttcaggagcgccttaaagaagatacgtcttttgggggcaacctcggacgagcagtcttccaggcgaaaaagaggattcttgaacctctgggcctggttgaggaacctgttaagacggctccgggaaaaaagaggccggtagagcactctcctgcggagccagactcctcctcgggaaccggaaagtcgggccagcagcctgcaagaaaaagattgaattttggtcagactggagacgcagactcagtacctgacccccagcctctcggacagccaccagcagccccctctggtctgggaactaatacgatggcttcaggcagtggcgcaccaatggcagacaataacgagggcgccgacggagtgggtaattcctcgggaaattggcattgcgattccacatggatgggcgacagagtcatcaccaccagcacccgaacctgggccctgcccacctacaacaaccacctctacaaacaaatttccagccaatcaggagcctcgaacgacaatcactactttggctacagcaccccttgggggtattttgacttcaacagattccactgccacttttcaccacgtgactggcaaagactcatcaacaacaactggggattccgacccaagagactcagcttcaagctctttaacattcaagtcaaagaggtcacgcagaatgacggtacgacgacgattgccaataaccttaccagcacggttcaggtgtttactgactcggagtaccagctcccgtacgtcctcggctcggcgcatcaaggatgcctcccgccgttcccagcagacgtcttcatggtgccacagtatggatacctcaccctgaacaacgggagtcaggcagtaggacgctcttcattttactgcctggagtactttccttctcagatgctgcgtaccggaaacaactttaccttcagctacacttttgaggacgttcctttccacagcagctacgctcacagccagagtctggaccgtctcatgaatcctctcatcgaccagtacctgtattacttgagcagaacaaacactccaagtggaaccaccacgatgtcaaggcttcagttttctcaggccggagcgagtgacattcgggaccagtctaggaactggcttcctggaccctgttaccgccagcagcgagtatcaaagacagctgcggataacaacaacagtgattactcgtggactggagctaccaagtaccacctcaatggcagagactctctggtgaatccgggcccggccatggcaagccacaaggacgatgaagaaaagtattttcctcagagcggggttctcatctttgggaagcaagactcaggaaaaacaaatgtggacattgaaaaggtcatgattacagacgaagaggaaatcaggacaaccaatcccgtggctacggagcagtatggttctgtatctaccaacctccagagcggcaacacacaagcagctacctcagatgtcaacacacaaggcgttcttccaggcatggtctggcaggacagagatgtgtaccttcaggggcccatctgggcaaagattccacacacggacggacattttcacccctctcccctcatgggtggattcggacttaaacaccctcctccacagattctcatcaagaacaccccggtacctgcgaatccttcgaccaccttcagtgcggcaaagtttgcttccttcatcacacagtactccacgggacaggtcagcgtggagatcgagtgggagctgcagaaggaaaacagcaaacgctggaatcccgaaattcagtacacttccaactacaacaagtctgttaatgtggactttactgtggacactaatggcgtgtattcagagcctcgccccattggcaccagatacctgactcgtaatctgtaa

SEQ ID NO: 2240 - DNA, 2208 bp, Artificial Sequence
  Description of Artificial Sequence: Synthetic polynucleotide
atggctgccgatggttatcttccagattggctcgaggacactctctctgaaggaataagacagtggtggaagctcaaacctggcccaccaccaccaaagcccgcagagcggcataaggacgacagcaggggtcttgtgcttcctgggtacaagtacctcggacccttcaacggactcgacaagggagagccggtcaacgaggcagacgccgcggccctcgagcacgacaaagcctacgaccggcagctcgacagcggagacaacccgtacctcaagtacaaccacgccgacgcggagtttcaggagcgccttaaagaagatacgtcttttgggggcaacctcggacgagcagtcttccaggcgaaaaagaggattcttgaacctctgggcctggttgaggaacctgttaagacggctccgggaaaaaagaggccggtagagcactctcctgcggagccagactcctcctcgggaaccggaaagtcgggccagcagcctgcaagaaaaagattgaattttggtcagactggagacgcagactcagtacctgacccccagcctctcggacagccaccagcagccccctctggtctgggaactaatacgatggcttcaggcagtggcgcaccaatggcagacaataacgagggcgccgacggagtgggtaattcctcgggaaattggcattgcgattccacatggatgggcgacagagtcatcaccaccagcacccgaacctgggccctgcccacctacaacaaccacctctacaaacaaatttccagccaatcaggagcctcgaacgacaatcactactttggctacagcaccccttgggggtattttgacttcaacagattccactgccacttttcaccacgtgactggcaaagactcatcaacaacaactggggattccgacccaagagactcaacttcaagctctttaacattcaagtcaaagaggtcacgcagaatgacggtacgacgacgattgccaataaccttaccagcacggttcaggtgtttactgactcggagtaccagctcccgtacgtcctcggctcggcgcatcaaggatgcctcccgccgttcccagcagacgtcttcatggtgccacagtatggatacctcaccctgaacaacgggagtcaggcagtaggacgctcttcattttactgcctggagtactttccttctcagatgctgcgtaccggaaacaactttaccttcagctacacttttgaggacgttcctttccacagcagctacgctcacagccagagtctggaccgtctcatgaatcctctcatcgaccagtacctgtattacttgagcagaacaaacactccaagtggaaccaccacgatgtcaaggcttcagttttctcaggccggagcgagtgacattcgggaccagtctaggaactggcttcctggaccctgttaccgccagcagcgagtatcaaagacagctgcggataacaacaacagtgattactcgtggactggagctaccaagtaccacctcaatggcagagactctctggtgaatccgggcccggccatggcaagccacaaggacgatgaagaaaagtattttcctcagagcggggttctcatctttgggaagcaagactcaggaaaaacaaatgtggacattgaaaaggtcatgattacagacgaagaggaaatcaggacaaccaatcccgtggctacggagcagtatggttctgtatctaccaacctccagagcggcaacacacaagcagctacctcagatgtcaacacacaaggcgttcttccaggcatggtctggcaggacagagatgtgtaccttcaggggcccatctgggcaaagattccacacacggacggacattttcacccctctcccctcatgggtggattcggacttaaacaccctcctccacagattctcatcaagaacaccccggtacctgcgaatccttcgaccaccttcagtgcggcaaagtttgcttccttcatcacacagtactccacgggacaggtcagcgtggagatcgagtgggagctgcagaaggaaaacagcaaacgctggaatcccgaaattcagtacacttccaactacaacaagtctgttaatgtggactttactgtggacactaatggcgtgtattcagagcctcgccccattggcaccagatacctgactcgtaatctgtaa

SEQ ID NO: 2241 - protein, 735 aa, Artificial Sequence
  Description of Artificial Sequence: Synthetic polypeptide
MAADGYLPDWLEDTLSEGIRQWWKLKPGPPPPKPAERHKDDSRGLVLPGYKYLGPFNGLDKGEPVNEADAAALEHDKAYDRQLDSGDNPYLKYNHADAEFQERLKEDTSFGGNLGRAVFQAKKRILEPLGLVEEPVKTAPGKKRPVEHSPAEPDSSSGTGKSGQQPARKRLNFGQTGDADSVPDPQPLGQPPAAPSGLGTNTMASGSGAPMADNNEGADGVGNSSGNWHCDSTWMGDRVITTSTRTWALPTYNNHLYKQISSQSGASNDNHYFGYSTPWGYFDFNRFHCHFSPRDWQRLINNNWGFRPKRLNFKLFNIQVKEVTQNDGTTTIANNLTSTVQVFTDSEYQLPYVLGSAHQGCLPPFPADVFMVPQYGYLTLNNGSQAVGRSSFYCLEYFPSQMLRTGNNFTFSYTFEDVPFHSSYAHSQSLDRLMNPLIDQYLYYLSRTNTPSGTTTMSRLQFSQAGASDIRDQSRNWLPGPCYRQQRVSKTAADNNNSDYSWTGATKYHLNGRDSLVNPGPAMASHKDDEEKYFPQSGVLIFGKQDSGKTNVDIEKVMITDEEEIRTTNPVATEQYGSVSTNLQSGNTQAATSDVNTQGVLPGMVWQDRDVYLQGPIWAKIPHTDGHFHPSPLMGGFGLKHPPPQILIKNTPVPANPSTTFSAAKFASFITQYSTGQVSVEIEWELQKENSKRWNPEIQYTSNYNKSVNVDFTVDTNGVYSEPRPIGTRYLTRNL

SEQ ID NO: 2242 - protein, 736 aa, Artificial Sequence
  Description of Artificial Sequence: Synthetic polypeptide
MAADGYLPDWLEDNLSEGIREWWDLKPGAPKPKANQQKQDDGRGLVLPGYKYLGPFNGLDKGEPVNAADAAALEHDKAYDQQLKAGDNPYLRYNHADAEFQERLQEDTSFGGNLGRAVFQAKKRVLEPFGLVEEGAKTAPGKKRPVEQSPQEPDSSSGIGKTGQQPAKKRLNFGQTGDSESVPDPQPLGEPPATPAAVGPTTMASGGGAPMADNNEGADGVGNASGNWHCDSTWLGDRVITTSTRTWALPTYNNHLYKQISSASTGASNDNHYFGYSTPWGYFDFNRFHCHFSPRDWQRLINNNWGFRPKRLNFKLFNIQVKEVTTNDGVTTIANNLTSTVQVFSDSEYQLPYVLGSAHQGCLPPFPADVFMIPQYGYLTLNNGSQAVGRSSFYCLEYFPSQMLRTGNNFTFSYTFEDVPFHSSYAHSQSLDRLMNPLIDQYLYFLNRTQNQSGSAQNKDLLFSRGSPAGMSVQPKNWLPGPCYRQQRVSKTKTDNNNSNFTWTGASKYNLNGRESIINPGTAMASHKDDKDKFFPMSGVMIFGKESAGASNTALDNVMITDEEEIKATNPVATERFGTVAVNLQSSSTDPATGDVHVMGALPGMVWQDRDVYLQGPIWAKIPHTDGHFHPSPLMGGFGLKHPPPQILIKNTPVPANPPAEFSATKFASFITQYSTGQVSVEIEWELQKENSKRWNPEVQYTSNYAKSANVDFTVDNNGLYTEPRPIGTRYLTRPL

SEQ ID NO: 2243 - protein, 747 aa, Artificial Sequence
  Description of Artificial Sequence: Synthetic polypeptide
MAADGYLPDWLEDTLSEGIRQWWKLKPGPPPPKPAERHKDDSRGLVLPGYKYLGPFNGLDKGEPVNEADAAALEHDKAYDRQLDSGDNPYLKYNHADAEFQERLKEDTSFGGNLGRAVFQAKKRVLEPLGLVEEPVKTAPGKKRPVEHSPVEPDSSSGTGKAGQQPARKRLNFGQTGDADSVPDPQPLGQPPAAPSGLGTNTMATGSGAPMADNNEGADGVGNSSGNWHCDSTWMGDRVITTSTRTWALPTYNNHLYKQISSQSGASNDNHYFGYSTPWGYFDFNRFHCHFSPRDWQRLINNNWGFRPKRLNFKLFNIQVKEVTQNDGTTTIANNLTSTVQVFTDSEYQLPYVLGSAHQGCLPPFPADVFMVPQYGYLTLNNGSQAVGRSSFYCLEYFPSQMLRTGNNFTFSYTFEDVPFHSSYAHSQSLDRLMNPLIDQYLYYLSRTNTPSGTTTQSRLQFSQAGASDIRDQSRNWLPGPCYRQQRVSKTSADNNNSEYSWTGATKYHLNGRDSLVNPGPAMASHKDDEEKFFPQSGVLIFGKQGSEKTNVDIEKVMITDEEEIRTTNPVATEQYGSVSTNLQRGNAAAGSTPPPMAARQAATADVNTQGVLPGMVWQDRDVYLQGPIWAKIPHTDGHFHPSPLMGGFGLKHPPPQILIKNTPVPANPSTTFSAAKFASFITQYSTGQVSVEIEWELQKENSKRWNPEIQYTSNYNKSVNVDFTVDTNGVYSEPRPIGTRYLTRNL

SEQ ID NO: 2244 - protein, 747 aa, Artificial Sequence
  Description of Artificial Sequence: Synthetic polypeptide
MAADGYLPDWLEDTLSEGIRQWWKLKPGPPPPKPAERHKDDSRGLVLPGYKYLGPFNGLDKGEPVNEADAAALEHDKAYDRQLDSGDNPYLKYNHADAEFQERLKEDTSFGGNLGRAVFQAKKRVLEPLGLVEEPVKTAPGKKRPVEHSPVEPDSSSGTGKAGQQPARKRLNFGQTGDADSVPDPQPLGQPPAAPSGLGTNTMATGSGAPMADNNEGADGVGNSSGNWHCDSTWMGDRVITTSTRTWALPTYNNHLYKQISSQSGASNDNHYFGYSTPWGYFDFNRFHCHFSPRDWQRLINNNWGFRPKRLNFKLFNIQVKEVTQNDGTTTIANNLTSTVQVFTDSEYQLPYVLGSAHQGCLPPFPADVFMVPQYGYLTLNNGSQAVGRSSFYCLEYFPSQMLRTGNNFTFSYTFEDVPFHSSYAHSQSLDRLMNPLIDQYLYYLSRTNTPSGTTTQSRLQFSQAGASDIRDQSRNWLPGPCYRQQRVSKTSADNNNSEYSWTGATKYHLNGRDSLVNPGPAMASHKDDEEKFFPQSGVLIFGKQGSEKTNVDIEKVMITDEEEIRTTNPVATEQYGSVSTNLQRGNAAAGETRAPLAARQAATADVNTQGVLPGMVWQDRDVYLQGPIWAKIPHTDGHFHPSPLMGGFGLKHPPPQILIKNTPVPANPSTTFSAAKFASFITQYSTGQVSVEIEWELQKENSKRWNPEIQYTSNYNKSVNVDFTVDTNGVYSEPRPIGTRYLTRNL

SEQ ID NO: 2245 - protein, 11 aa, Artificial Sequence
  Description of Artificial Sequence: Synthetic polypeptide
AQTLAVPFKAQ

SEQ ID NO: 2246 - protein, 11 aa, Artificial Sequence
  Description of Artificial Sequence: Synthetic polypeptide
AQSVSKPFLAQ

SEQ ID NO: 2247 - protein, 11 aa, Artificial Sequence
  Description of Artificial Sequence: Synthetic polypeptide
AQFTLTTPKAQ

SEQ ID NO: 2248 - protein, 11 aa, Artificial Sequence
  Description of Artificial Sequence: Synthetic polypeptide
DGTLAVPFKAQ

SEQ ID NO: 2249 - protein, 11 aa, Artificial Sequence
  Description of Artificial Sequence: Synthetic polypeptide
ESTLAVPFKAQ

SEQ ID NO: 2250 - protein, 11 aa, Artificial Sequence
  Description of Artificial Sequence: Synthetic polypeptide
GGTLAVPFKAQ

SEQ ID NO: 2251 - protein, 11 aa, Artificial Sequence
  Description of Artificial Sequence: Synthetic polypeptide
AQTLATPFKAQ

SEQ ID NO: 2252 - protein, 11 aa, Artificial Sequence
  Description of Artificial Sequence: Synthetic polypeptide
ATTLATPFKAQ

SEQ ID NO: 2253 - protein, 11 aa, Artificial Sequence
  Description of Artificial Sequence: Synthetic polypeptide
DGTLATPFKAQ

SEQ ID NO: 2254 - protein, 11 aa, Artificial Sequence
  Description of Artificial Sequence: Synthetic polypeptide
GGTLATPFKAQ

SEQ ID NO: 2255 - protein, 11 aa, Artificial Sequence
  Description of Artificial Sequence: Synthetic polypeptide
SGSLAVPFKAQ

SEQ ID NO: 2256 - protein, 11 aa, Artificial Sequence
  Description of Artificial Sequence: Synthetic polypeptide
AQTLAQPFKAQ

SEQ ID NO: 2257 - protein, 11 aa, Artificial Sequence
  Description of Artificial Sequence: Synthetic polypeptide
AQTLQQPFKAQ

SEQ ID NO: 2258 - protein, 11 aa, Artificial Sequence
  Description of Artificial Sequence: Synthetic polypeptide
AQTLSNPFKAQ

SEQ ID NO: 2259 - protein, 11 aa, Artificial Sequence
  Description of Artificial Sequence: Synthetic polypeptide
AQTLAVPFSNP

SEQ ID NO: 2260 - protein, 11 aa, Artificial Sequence
  Description of Artificial Sequence: Synthetic polypeptide
QGTLAVPFKAQ

SEQ ID NO: 2261 - protein, 11 aa, Artificial Sequence
  Description of Artificial Sequence: Synthetic polypeptide
NQTLAVPFKAQ

SEQ ID NO: 2262 - protein, 11 aa, Artificial Sequence
  Description of Artificial Sequence: Synthetic polypeptide
EGSLAVPFKAQ

SEQ ID NO: 2263 - protein, 11 aa, Artificial Sequence
  Description of Artificial Sequence: Synthetic polypeptide
SGNLAVPFKAQ

SEQ ID NO: 2264 - protein, 11 aa, Artificial Sequence
  Description of Artificial Sequence: Synthetic polypeptide
EGTLAVPFKAQ

SEQ ID NO: 2265 - protein, 11 aa, Artificial Sequence
  Description of Artificial Sequence: Synthetic polypeptide
DSTLAVPFKAQ

SEQ ID NO: 2266 - protein, 11 aa, Artificial Sequence
  Description of Artificial Sequence: Synthetic polypeptide
AVTLAVPFKAQ

SEQ ID NO: 2267 - protein, 11 aa, Artificial Sequence
  Description of Artificial Sequence: Synthetic polypeptide
AQTLSTPFKAQ

SEQ ID NO: 2268 - protein, 11 aa, Artificial Sequence
  Description of Artificial Sequence: Synthetic polypeptide
AQTLPQPFKAQ

SEQ ID NO: 2269 - protein, 11 aa, Artificial Sequence
  Description of Artificial Sequence: Synthetic polypeptide
AQTLSQPFKAQ

SEQ ID NO: 2270 - protein, 11 aa, Artificial Sequence
  Description of Artificial Sequence: Synthetic polypeptide
AQTLQLPFKAQ

SEQ ID NO: 2271 - protein, 11 aa, Artificial Sequence
  Description of Artificial Sequence: Synthetic polypeptide
AQTLTMPFKAQ

SEQ ID NO: 2272 - protein, 11 aa, Artificial Sequence
  Description of Artificial Sequence: Synthetic polypeptide
AQTLTTPFKAQ

SEQ ID NO: 2273 - protein, 11 aa, Artificial Sequence
  Description of Artificial Sequence: Synthetic polypeptide
AQYTLSQGWAQ

SEQ ID NO: 2274 - protein, 11 aa, Artificial Sequence
  Description of Artificial Sequence: Synthetic polypeptide
AQMNATKNVAQ

SEQ ID NO: 2275 - protein, 11 aa, Artificial Sequence
  Description of Artificial Sequence: Synthetic polypeptide
AQVSGGHHSAQ

SEQ ID NO: 2276 - protein, 11 aa, Artificial Sequence
  Description of Artificial Sequence: Synthetic polypeptide
AQTLTAPFKAQ

SEQ ID NO: 2277 - protein, 11 aa, Artificial Sequence
  Description of Artificial Sequence: Synthetic polypeptide
AQTLSKPFKAQ

SEQ ID NO: 2278 - protein, 7 aa, Artificial Sequence
  Description of Artificial Sequence: Synthetic polypeptide
QAVRTSL

SEQ ID NO: 2279 - protein, 7 aa, Artificial Sequence
  Description of Artificial Sequence: Synthetic polypeptide
LAKERLS

SEQ ID NO: 2280 - protein, 7 aa, Artificial Sequence
  Description of Artificial Sequence: Synthetic polypeptide
MNSTKNV

SEQ ID NO: 2281 - protein, 7 aa, Artificial Sequence
  Description of Artificial Sequence: Synthetic polypeptide
VSGGHHS

SEQ ID NO: 2282 - protein, 14 aa, Artificial Sequence
  Description of Artificial Sequence: Synthetic polypeptide
SAQTLAVPFKAQAQ

SEQ ID NO: 2283 - protein, 14 aa, Artificial Sequence
  Description of Artificial Sequence: Synthetic polypeptide
  MOD_RES (2)..(4): Xaa can be any naturally occurring amino acid
SXXXLAVPFKAQAQ

SEQ ID NO: 2284 - protein, 14 aa, Artificial Sequence
  Description of Artificial Sequence: Synthetic polypeptide
  MOD_RES (4)..(6): Xaa can be any naturally occurring amino acid
SAQXXXVPFKAQAQ

SEQ ID NO: 2285 - protein, 14 aa, Artificial Sequence
  Description of Artificial Sequence: Synthetic polypeptide
  MOD_RES (6)..(8): Xaa can be any naturally occurring amino acid
SAQTLXXXFKAQAQ

SEQ ID NO: 2286 - protein, 14 aa, Artificial Sequence
  Description of Artificial Sequence: Synthetic polypeptide
  MOD_RES (8)..(10): Xaa can be any naturally occurring amino acid
SAQTLAVXXXAQAQ

SEQ ID NO: 2287 - protein, 14 aa, Artificial Sequence
  Description of Artificial Sequence: Synthetic polypeptide
  MOD_RES (10)..(12): Xaa can be any naturally occurring amino acid
SAQTLAVPFXXXAQ

SEQ ID NO: 2288 - protein, 7 aa, Artificial Sequence
  Description of Artificial Sequence: Synthetic polypeptide
TNHQSAQ

SEQ ID NO: 2289 - protein, 7 aa, Artificial Sequence
  Description of Artificial Sequence: Synthetic polypeptide
AQAQTGW

SEQ ID NO: 2290 - protein, 9 aa, Artificial Sequence
  Description of Artificial Sequence: Synthetic polypeptide
DGTLATPFK

SEQ ID NO: 2291 - protein, 11 aa, Artificial Sequence
  Description of Artificial Sequence: Synthetic polypeptide
  MOD_RES (10)..(11): Xaa can be any naturally occurring amino acid
DGTLATPFKXX

SEQ ID NO: 2292 - protein, 8 aa, Artificial Sequence
  Description of Artificial Sequence: Synthetic polypeptide
LAVPFKAQ

SEQ ID NO: 2293 - protein, 6 aa, Artificial Sequence
  Description of Artificial Sequence: Synthetic polypeptide
VPFKAQ

SEQ ID NO: 2294 - protein, 4 aa, Artificial Sequence
  Description of Artificial Sequence: Synthetic polypeptide
FKAQ

SEQ ID NO: 2295 - protein, 6 aa, Artificial Sequence
  Description of Artificial Sequence: Synthetic polypeptide
AQTLAV

SEQ ID NO: 2296 - protein, 8 aa, Artificial Sequence
  Description of Artificial Sequence: Synthetic polypeptide
AQTLAVPF

SEQ ID NO: 2297 - protein, 4 aa, Artificial Sequence
  Description of Artificial Sequence: Synthetic polypeptide
QAVR

SEQ ID NO: 2298 - protein, 4 aa, Artificial Sequence
  Description of Artificial Sequence: Synthetic polypeptide
AVRT

SEQ ID NO: 2299 - protein, 4 aa, Artificial Sequence
  Description of Artificial Sequence: Synthetic polypeptide
VRTS

SEQ ID NO: 2300 - protein, 4 aa, Artificial Sequence
  Description of Artificial Sequence: Synthetic polypeptide
RTSL

SEQ ID NO: 2301 - protein, 5 aa, Artificial Sequence
  Description of Artificial Sequence: Synthetic polypeptide
QAVRT

SEQ ID NO: 2302 - protein, 5 aa, Artificial Sequence
  Description of Artificial Sequence: Synthetic polypeptide
AVRTS

SEQ ID NO: 2303 - protein, 5 aa, Artificial Sequence
  Description of Artificial Sequence: Synthetic polypeptide
VRTSL

SEQ ID NO: 2304 - protein, 6 aa, Artificial Sequence
  Description of Artificial Sequence: Synthetic polypeptide
QAVRTS

SEQ ID NO: 2305 - protein, 6 aa, Artificial Sequence
  Description of Artificial Sequence: Synthetic polypeptide
AVRTSL

SEQ ID NO: 2306 - DNA, 33 bp, Artificial Sequence
  Description of Artificial Sequence: Synthetic polynucleotide
gatgggactttggcggtgccttttaaggcacag

SEQ ID NO: 2307 - DNA, 33 bp, Artificial Sequence
  Description of Artificial Sequence: Synthetic polynucleotide
gatgggacgttggcggtgccttttaaggcacag

SEQ ID NO: 2308 - DNA, 21 bp, Artificial Sequence
  Description of Artificial Sequence: Synthetic polynucleotide
caggcggttaggacgtctttg

SEQ ID NO: 2309 - DNA, 27 bp, Artificial Sequence
  Description of Artificial Sequence: Synthetic polynucleotide
caggtcttcacggactcagactatcag

SEQ ID NO: 2310 - DNA, 32 bp, Artificial Sequence
  Description of Artificial Sequence: Synthetic polynucleotide
caagtaaaacctctacaaatgtggtaaaatcg

SEQ ID NO: 2311 - DNA, 36 bp, Artificial Sequence
  Description of Artificial Sequence: Synthetic polynucleotide
actcatcgaccaatacttgtactatctctctagaac

SEQ ID NO: 2312 - DNA, 26 bp, Artificial Sequence
  Description of Artificial Sequence: Synthetic polynucleotide
ggaagtattccttggttttgaaccca

SEQ ID NO: 2313 - DNA, 23 bp, Artificial Sequence
  Description of Artificial Sequence: Synthetic polynucleotide
ggtcgcggttcttgtttgtggat

SEQ ID NO: 2314 - DNA, 24 bp, Artificial Sequence
  Description of Artificial Sequence: Synthetic polynucleotide
cgaccttgaagcgcatgaactcct

SEQ ID NO: 2315 - DNA, 83 bp, Artificial Sequence
  Description of Artificial Sequence: Synthetic polynucleotide
  misc_feature (42)..(43): n is a, c, g, or t
  misc_feature (45)..(46): n is a, c, g, or t
  misc_feature (48)..(49): n is a, c, g, or t
  misc_feature (51)..(52): n is a, c, g, or t
  misc_feature (54)..(55): n is a, c, g, or t
  misc_feature (57)..(58): n is a, c, g, or t
  misc_feature (60)..(61): n is a, c, g, or t
gtattccttggttttgaacccaaccggtctgcgcctgtgcmnnmnnmnnmnnmnnmnnmnnttgggcactctggtggtttgtc

SEQ ID NO: 2316 - DNA, 64 bp, Artificial Sequence
  Description of Artificial Sequence: Synthetic polynucleotide
  misc_feature (36)..(37): n is a, c, g, or t
  misc_feature (39)..(40): n is a, c, g, or t
  misc_feature (42)..(43): n is a, c, g, or t
gtattccttggttttgaacccaaccggtctgcgcmnnmnnmnnaaaaggcaccgccaaagtttg

SEQ ID NO: 2317 - DNA, 70 bp, Artificial Sequence
  Description of Artificial Sequence: Synthetic polynucleotide
  misc_feature (42)..(43): n is a, c, g, or t
  misc_feature (45)..(46): n is a, c, g, or t
  misc_feature (48)..(49): n is a, c, g, or t
gtattccttggttttgaacccaaccggtctgcgcctgtgcmnnmnnmnncaccgccaaagtttgggcact

SEQ ID NO: 2318 - DNA, 77 bp, Artificial Sequence
  Description of Artificial Sequence: Synthetic polynucleotide
  misc_feature (48)..(49): n is a, c, g, or t
  misc_feature (51)..(52): n is a, c, g, or t
  misc_feature (54)..(55): n is a, c, g, or t
gtattccttggttttgaacccaaccggtctgcgcctgtgccttaaamnnmnnmnncaaagtttgggcactctggtgg

SEQ ID NO: 2319 - DNA, 83 bp, Artificial Sequence
  Description of Artificial Sequence: Synthetic polynucleotide
  misc_feature (54)..(55): n is a, c, g, or t
  misc_feature (57)..(58): n is a, c, g, or t
  misc_feature (60)..(61): n is a, c, g, or t
gtattccttggttttgaacccaaccggtctgcgcctgtgccttaaaaggcacmnnmnnmnnttgggcactctggtggtttgtg

SEQ ID NO: 2320 - DNA, 21 bp, Artificial Sequence
  Description of Artificial Sequence: Synthetic polynucleotide
cttgcgaaggagcggctttcg

SEQ ID NO: 2321 - protein, 10 aa, Artificial Sequence
  Description of Artificial Sequence: Synthetic polypeptide
VNLTWSRASG

SEQ ID NO: 2322 - protein, 14 aa, Artificial Sequence
  Description of Artificial Sequence: Synthetic polypeptide
EFCINHRGYWVCGD

SEQ ID NO: 2323 - protein, 11 aa, Artificial Sequence
  Description of Artificial Sequence: Synthetic polypeptide
EDGQVMDVDLS

SEQ ID NO: 2324 - protein, 9 aa, Artificial Sequence
  Description of Artificial Sequence: Synthetic polypeptide
EKQRNGTLT

SEQ ID NO: 2325 - protein, 17 aa, Artificial Sequence
  Description of Artificial Sequence: Synthetic polypeptide
TYQCRVTHPHLPRALMR

SEQ ID NO: 2326 - protein, 14 aa, Artificial Sequence
  Description of Artificial Sequence: Synthetic polypeptide
RHSTTQPRKTKGSG

SEQ ID NO: 2327 - protein, 13 aa, Artificial Sequence
  Description of Artificial Sequence: Synthetic polypeptide
DSNPRGVSAYLSR

SEQ ID NO: 2328 - protein, 12 aa, Artificial Sequence
  Description of Artificial Sequence: Synthetic polypeptide
TITCLWDLAPSK

SEQ ID NO: 2329 - protein, 10 aa, Artificial Sequence
  Description of Artificial Sequence: Synthetic polypeptide
KTKGSGFFVF

SEQ ID NO: 2330 - protein, 12 aa, Artificial Sequence
  Description of Artificial Sequence: Synthetic polypeptide
THPHLPRALMRS

SEQ ID NO: 2331 - protein, 23 aa, Artificial Sequence
  Description of Artificial Sequence: Synthetic polypeptide
GETYQCRVTHPHLPRALMRSTTK

SEQ ID NO: 2332 - protein, 8 aa, Artificial Sequence
  Description of Artificial Sequence: Synthetic polypeptide
LPRALMRS

SEQ ID NO: 2333 - protein, 8 aa, Artificial Sequence
  Description of Artificial Sequence: Synthetic polypeptide
INHRGYWV

SEQ ID NO: 2334 - protein, 12 aa, Artificial Sequence
  Description of Artificial Sequence: Synthetic polypeptide
CDAGSVRTNAPD

SEQ ID NO: 2335 - protein, 17 aa, Artificial Sequence
  Description of Artificial Sequence: Synthetic polypeptide
AKAVSNLTESRSESLQS

SEQ ID NO: 2336 - protein, 13 aa, Artificial Sequence
  Description of Artificial Sequence: Synthetic polypeptide
SLTGDEFKKVLET

SEQ ID NO: 2337 - protein, 11 aa, Artificial Sequence
  Description of Artificial Sequence: Synthetic polypeptide
REAVAYRFEED

SEQ ID NO: 2338 - protein, 10 aa, Artificial Sequence
  Description of Artificial Sequence: Synthetic polypeptide
INPEIITLDG

SEQ ID NO: 2339 - protein, 15 aa, Artificial Sequence
  Description of Artificial Sequence: Synthetic polypeptide
DISVTGAPVITATYL

SEQ ID NO: 2340 - protein, 12 aa, Artificial Sequence
  Description of Artificial Sequence: Synthetic polypeptide
DISVTGAPVITA

SEQ ID NO: 2341 - protein, 17 aa, Artificial Sequence
  Description of Artificial Sequence: Synthetic polypeptide
PKTVSNLTESSSESVQS

SEQ ID NO: 2342 - protein, 13 aa, Artificial Sequence
  Description of Artificial Sequence: Synthetic polypeptide
SLMGDEFKAVLET

SEQ ID NO: 2343 - protein, 11 aa, Artificial Sequence
  Description of Artificial Sequence: Synthetic polypeptide
QHSVAYTFEED

SEQ ID NO: 2344 - protein, 10 aa, Artificial Sequence
  Description of Artificial Sequence: Synthetic polypeptide
INPEIITRDG

SEQ ID NO: 2345 - protein, 15 aa, Artificial Sequence
  Description of Artificial Sequence: Synthetic polypeptide
DISLTGDPVITASYL

SEQ ID NO: 2346 - protein, 12 aa, Artificial Sequence
  Description of Artificial Sequence: Synthetic polypeptide
DISLTGDPVITA

SEQ ID NO: 2347 - protein, 11 aa, Artificial Sequence
  Description of Artificial Sequence: Synthetic polypeptide
DQSIDFEIDSA

SEQ ID NO: 2348 - protein, 20 aa, Artificial Sequence
  Description of Artificial Sequence: Synthetic polypeptide
KNVSEDLPLPTFSPTLLGDS

SEQ ID NO: 2349 - protein, 11 aa, Artificial Sequence
  Description of Artificial Sequence: Synthetic polypeptide
KNVSEDLPLPT

SEQ ID NO: 2350 - protein, 12 aa, Artificial Sequence
  Description of Artificial Sequence: Synthetic polypeptide
CDSGRVRTDAPD

SEQ ID NO: 2351 - protein, 14 aa, Artificial Sequence
  Description of Artificial Sequence: Synthetic polypeptide
FPEHLLVDFLQSLS

SEQ ID NO: 2352 - protein, 9 aa, Artificial Sequence
  Description of Artificial Sequence: Synthetic polypeptide
DAEFRHDSG

SEQ ID NO: 2353 - protein, 16 aa, Artificial Sequence
  Description of Artificial Sequence: Synthetic polypeptide
HYAAAQWDFGNTMCQL

SEQ ID NO: 2354 - protein, 13 aa, Artificial Sequence
  Description of Artificial Sequence: Synthetic polypeptide
YAAQWDFGNTMCQ

SEQ ID NO: 2355 - protein, 10 aa, Artificial Sequence
  Description of Artificial Sequence: Synthetic polypeptide
RSQKEGLHYT

SEQ ID NO: 2356 - protein, 19 aa, Artificial Sequence
  Description of Artificial Sequence: Synthetic polypeptide
SSRTPSDKPVAHWANPQAE

SEQ ID NO: 2357 - protein, 15 aa, Artificial Sequence
  Description of Artificial Sequence: Synthetic polypeptide
SRTPSDKPVAHWANP

SEQ ID NO: 2358 - protein, 9 aa, Artificial Sequence
  Description of Artificial Sequence: Synthetic polypeptide
SSRTPSDKP

SEQ ID NO: 2359 - protein, 14 aa, Artificial Sequence
  Description of Artificial Sequence: Synthetic polypeptide
NADGNVDYHMNSVP

SEQ ID NO: 2360 - protein, 11 aa, Artificial Sequence
  Description of Artificial Sequence: Synthetic polypeptide
DGNVDYHMNSV

SEQ ID NO: 2361 - protein, 16 aa, Artificial Sequence
  Description of Artificial Sequence: Synthetic polypeptide
RSFKEFLQSSLRALRQ

SEQ ID NO: 2362 - protein, 11 aa, Artificial Sequence
  Description of Artificial Sequence: Synthetic polypeptide
FKEFLQSSLRA

SEQ ID NO: 2363 - protein, 10 aa, Artificial Sequence
  Description of Artificial Sequence: Synthetic polypeptide
QMWAPQWGPD

SEQ ID NO: 2364 - protein, 6 aa, Artificial Sequence
  Description of Artificial Sequence: Synthetic polypeptide
RGNRQA

SEQ ID NO: 2365 - protein, 6 aa, Artificial Sequence
  Description of Artificial Sequence: Synthetic polypeptide
SSSTDP

SEQ ID NO: 2366 - protein, 6 aa, Artificial Sequence
  Description of Artificial Sequence: Synthetic polypeptide
SSNTAP

SEQ ID NO: 2367 - protein, 6 aa, Artificial Sequence
  Description of Artificial Sequence: Synthetic polypeptide
SNSNLP

SEQ ID NO: 2368 - protein, 6 aa, Artificial Sequence
  Description of Artificial Sequence: Synthetic polypeptide
SSTTAP

SEQ ID NO: 2369 - protein, 6 aa, Artificial Sequence
  Description of Artificial Sequence: Synthetic polypeptide
AANTAA

SEQ ID NO: 2370 - protein, 6 aa, Artificial Sequence
  Description of Artificial Sequence: Synthetic polypeptide
QQNTAP

SEQ ID NO: 2371 - protein, 6 aa, Artificial Sequence
  Description of Artificial Sequence: Synthetic polypeptide
SAQAQA

SEQ ID NO: 2372 - protein, 6 aa, Artificial Sequence
  Description of Artificial Sequence: Synthetic polypeptide
QANTGP

SEQ ID NO: 2373 - protein, 6 aa, Artificial Sequence
  Description of Artificial Sequence: Synthetic polypeptide
NATTAP

SEQ ID NO: 2374 - protein, 6 aa, Artificial Sequence
  Description of Artificial Sequence: Synthetic polypeptide
SSTAGP

SEQ ID NO: 2375 - protein, 6 aa, Artificial Sequence
  Description of Artificial Sequence: Synthetic polypeptide
QQNTAA

SEQ ID NO: 2376 - protein, 6 aa, Artificial Sequence
  Description of Artificial Sequence: Synthetic polypeptide
PSTAGP

SEQ ID NO: 2377 - protein, 6 aa, Artificial Sequence
  Description of Artificial Sequence: Synthetic polypeptide
NQNTAP

SEQ ID NO: 2378 - protein, 6 aa, Artificial Sequence
  Description of Artificial Sequence: Synthetic polypeptide
QAANAP

SEQ ID NO: 2379 - protein, 6 aa, Artificial Sequence
  Description of Artificial Sequence: Synthetic polypeptide
SIVGLP

SEQ ID NO: 2380 - protein, 6 aa, Artificial Sequence
  Description of Artificial Sequence: Synthetic polypeptide
AASTAA

SEQ ID NO: 2381 - protein, 6 aa, Artificial Sequence
  Description of Artificial Sequence: Synthetic polypeptide
SQNTTA

SEQ ID NO: 2382 - protein, 6 aa, Artificial Sequence
  Description of Artificial Sequence: Synthetic polypeptide
QQDTAP

SEQ ID NO: 2383 - protein, 6 aa, Artificial Sequence
  Description of Artificial Sequence: Synthetic polypeptide
QTNTGP

SEQ ID NO: 2384 - protein, 6 aa, Artificial Sequence
  Description of Artificial Sequence: Synthetic polypeptide
QTNGAP

SEQ ID NO: 2385 - protein, 6 aa, Artificial Sequence
  Description of Artificial Sequence: Synthetic polypeptide
QQNAAP

SEQ ID NO: 2386 - protein, 6 aa, Artificial Sequence
  Description of Artificial Sequence: Synthetic polypeptide
AANTQA

SEQ ID NO: 2387 - protein, 6 aa, Artificial Sequence
  Description of Artificial Sequence: Synthetic polypeptide
NGRAHA

SEQ ID NO: 2388 - protein, 7 aa, Artificial Sequence
  Description of Artificial Sequence: Synthetic polypeptide
QPEHSST

SEQ ID NO: 2389 - protein, 7 aa, Artificial Sequence
  Description of Artificial Sequence: Synthetic polypeptide
VNTANST

SEQ ID NO: 2390 - protein, 7 aa, Artificial Sequence
  Description of Artificial Sequence: Synthetic polypeptide
HGPMQKS

SEQ ID NO: 2391 - protein, 7 aa, Artificial Sequence
  Description of Artificial Sequence: Synthetic polypeptide
PHKPPLA

SEQ ID NO: 2392 - protein, 7 aa, Artificial Sequence
  Description of Artificial Sequence: Synthetic polypeptide
IKNNEMW

SEQ ID NO: 2393 - protein, 7 aa, Artificial Sequence
  Description of Artificial Sequence: Synthetic polypeptide
RNLDTPM

SEQ ID NO: 2394 - protein, 7 aa, Artificial Sequence
  Description of Artificial Sequence: Synthetic polypeptide
VDSHRQS

SEQ ID NO: 2395 - protein, 7 aa, Artificial Sequence
  Description of Artificial Sequence: Synthetic polypeptide
YDSKTKT

SEQ ID NO: 2396 - protein, 7 aa, Artificial Sequence
  Description of Artificial Sequence: Synthetic polypeptide
SQLPHQK

SEQ ID NO: 2397 - protein, 7 aa, Artificial Sequence
  Description of Artificial Sequence: Synthetic polypeptide
STMQQNT

SEQ ID NO: 2398 - protein, 7 aa, Artificial Sequence
  Description of Artificial Sequence: Synthetic polypeptide
TERYMTQ

SEQ ID NO: 2399 - protein, 7 aa, Artificial Sequence
  Description of Artificial Sequence: Synthetic polypeptide
DASLSTS

SEQ ID NO: 2400 - protein, 7 aa, Artificial Sequence
  Description of Artificial Sequence: Synthetic polypeptide
DLPNKKT

SEQ ID NO: 2401 - protein, 7 aa, Artificial Sequence
  Description of Artificial Sequence: Synthetic polypeptide
DLTAARL

SEQ ID NO: 2402 - protein, 7 aa, Artificial Sequence
  Description of Artificial Sequence: Synthetic polypeptide
EPHQFNY

SEQ ID NO: 2403 - protein, 7 aa, Artificial Sequence
  Description of Artificial Sequence: Synthetic polypeptide
EPQSNHT

SEQ ID NO: 2404 - protein, 7 aa, Artificial Sequence
  Description of Artificial Sequence: Synthetic polypeptide
MSSWPSQ

SEQ ID NO: 2405 - protein, 7 aa, Artificial Sequence
  Description of Artificial Sequence: Synthetic polypeptide
NPKHNAT

SEQ ID NO: 2406 - protein, 7 aa, Artificial Sequence
  Description of Artificial Sequence: Synthetic polypeptide
PDGMRTT

SEQ ID NO: 2407 - protein, 7 aa, Artificial Sequence
  Description of Artificial Sequence: Synthetic polypeptide
PNNNKTT

SEQ ID NO: 2408 - protein, 7 aa, Artificial Sequence
  Description of Artificial Sequence: Synthetic polypeptide
QSTTHDS

SEQ ID NO: 2409 - protein, 7 aa, Artificial Sequence
  Description of Artificial Sequence: Synthetic polypeptide
TGSKQKQ

SEQ ID NO: 2410 - protein, 7 aa, Artificial Sequence
  Description of Artificial Sequence: Synthetic polypeptide
SLKHQAL

SEQ ID NO: 2411 - protein, 7 aa, Artificial Sequence
  Description of Artificial Sequence: Synthetic polypeptide
SPIDGEQ

SEQ ID NO: 2412 - protein, 8 aa, Artificial Sequence
  Description of Artificial Sequence: Synthetic polypeptide
WIFPWIQL

SEQ ID NO: 2413 - protein, 9 aa, Artificial Sequence
  Description of Artificial Sequence: Synthetic polypeptide
CDCRGDCFC

SEQ ID NO: 2414 - protein, 5 aa, Artificial Sequence
  Description of Artificial Sequence: Synthetic polypeptide
CNGRC

SEQ ID NO: 2415 - protein, 7 aa, Artificial Sequence
  Description of Artificial Sequence: Synthetic polypeptide
CPRECES

SEQ ID NO: 2416 - protein, 10 aa, Artificial Sequence
  Description of Artificial Sequence: Synthetic polypeptide
CTTHWGFTLC

SEQ ID NO: 2417 - protein, 9 aa, Artificial Sequence
  Description of Artificial Sequence: Synthetic polypeptide
CGRRAGGSC

SEQ ID NO: 2418 - protein, 9 aa, Artificial Sequence
  Description of Artificial Sequence: Synthetic polypeptide
CKGGRAKDC

SEQ ID NO: 2419 - protein, 9 aa, Artificial Sequence
  Description of Artificial Sequence: Synthetic polypeptide
CVPELGHEC

SEQ ID NO: 2420 - protein, 9 aa, Artificial Sequence
  Description of Artificial Sequence: Synthetic polypeptide
CRRETAWAK

SEQ ID NO: 2421 - protein, 14 aa, Artificial Sequence
  Description of Artificial Sequence: Synthetic polypeptide
VSWFSHRYSPFAVS

SEQ ID NO: 2422 - protein, 13 aa, Artificial Sequence
  Description of Artificial Sequence: Synthetic polypeptide
GYRDGYAGPILYN

SEQ ID NO: 2423 - protein, 7 aa, Artificial Sequence
  Description of Artificial Sequence: Synthetic polypeptide
  MOD_RES (1)..(3): Xaa can be any naturally occurring amino acid
  MOD_RES (5)..(7): Xaa can be any naturally occurring amino acid
XXXYXXX

SEQ ID NO: 2424 - protein, 4 aa, Artificial Sequence
  Description of Artificial Sequence: Synthetic polypeptide
  MOD_RES (2)..(2): Xaa is Glu or Met
YXNW

SEQ ID NO: 2425 - protein, 7 aa, Artificial Sequence
  Description of Artificial Sequence: Synthetic polypeptide
RPLPPLP

SEQ ID NO: 2426 - protein, 7 aa, Artificial Sequence
  Description of Artificial Sequence: Synthetic polypeptide
APPLPPR

SEQ ID NO: 2427 - protein, 12 aa, Artificial Sequence
  Description of Artificial Sequence: Synthetic polypeptide
DVFYPYPYASGS

SEQ ID NO: 2428 - protein, 6 aa, Artificial Sequence
  Description of Artificial Sequence: Synthetic polypeptide
MYWYPY

SEQ ID NO: 2429 - protein, 12 aa, Artificial Sequence
  Description of Artificial Sequence: Synthetic polypeptide
DITWDQLWDLMK

SEQ ID NO: 2430 - protein, 8 aa, Artificial Sequence
  Description of Artificial Sequence: Synthetic polypeptide
  MOD_RES (5)..(5): Xaa Gly or Leu
CWDDXWLC

SEQ ID NO: 2431 - protein, 14 aa, Artificial Sequence
  Description of Artificial Sequence: Synthetic polypeptide
EWCEYLGGYLRCYA

SEQ ID NO: 2432 - protein, 14 aa, Artificial Sequence
  Description of Artificial Sequence: Synthetic polypeptide
  MOD_RES (2)..(2): Xaa can be any naturally occurring amino acid
  MOD_RES (4)..(5): Xaa can be any naturally occurring amino acid
  MOD_RES (8)..(8): Xaa can be any naturally occurring amino acid
  MOD_RES (11)..(11): Xaa can be any naturally occurring amino acid
  MOD_RES (13)..(13): Xaa can be any naturally occurring amino acid
YXCXXGPXTWXCXP

SEQ ID NO: 2433 - protein, 14 aa, Artificial Sequence
  Description of Artificial Sequence: Synthetic polypeptide
IEGPTLRQWLAARA

SEQ ID NO: 2434 - protein, 5 aa, Artificial Sequence
  Description of Artificial Sequence: Synthetic polypeptide
  MOD_RES (3)..(4): Xaa can be any naturally occurring amino acid
  MOD_RES (5)..(5): Xaa is Tyr, Trp, Phe, or His
LWXXX

SEQ ID NO: 2435 - protein, 7 aa, Artificial Sequence
  Description of Artificial Sequence: Synthetic polypeptide
  MOD_RES (1)..(1): Xaa can be any naturally occurring amino acid
  MOD_RES (3)..(4): Xaa can be any naturally occurring amino acid
XFXXYLW

SEQ ID NO: 2436 - protein, 13 aa, Artificial Sequence
  Description of Artificial Sequence: Synthetic polypeptide
SSIISHFRWGLCD

SEQ ID NO: 2437 - protein, 13 aa, Artificial Sequence
  Description of Artificial Sequence: Synthetic polypeptide
MSRPACPPNDKYE

SEQ ID NO: 2438 - protein, 8 aa, Artificial Sequence
  Description of Artificial Sequence: Synthetic polypeptide
CLRSGRGC

SEQ ID NO: 2439 - protein, 9 aa, Artificial Sequence
  Description of Artificial Sequence: Synthetic polypeptide
CHWMFSPWC

SEQ ID NO: 2440 - protein, 4 aa, Artificial Sequence
  Description of Artificial Sequence: Synthetic polypeptide
  MOD_RES (2)..(3): Xaa can be any naturally occurring amino acid
WXXF

SEQ ID NO: 2441 - protein, 8 aa, Artificial Sequence
  Description of Artificial Sequence: Synthetic polypeptide
CSSRLDAC

SEQ ID NO: 2442 - protein, 7 aa, Artificial Sequence
  Description of Artificial Sequence: Synthetic polypeptide
CLPVASC

SEQ ID NO: 2443 - protein, 13 aa, Artificial Sequence
  Description of Artificial Sequence: Synthetic polypeptide
CGFECVRQCPERC

SEQ ID NO: 2444 - protein, 13 aa, Artificial Sequence
  Description of Artificial Sequence: Synthetic polypeptide
CVALCREACGEGC

SEQ ID NO: 2445 - protein, 9 aa, Artificial Sequence
  Description of Artificial Sequence: Synthetic polypeptide
SWCEPGWCR

SEQ ID NO: 2446 - protein, 7 aa, Artificial Sequence
  Description of Artificial Sequence: Synthetic polypeptide
YSGKWGW

SEQ ID NO: 2447 - protein, 7 aa, Artificial Sequence
  Description of Artificial Sequence: Synthetic polypeptide
GLSGGRS

SEQ ID NO: 2448 - protein, 7 aa, Artificial Sequence
  Description of Artificial Sequence: Synthetic polypeptide
LMLPRAD

SEQ ID NO: 2449 - protein, 9 aa, Artificial Sequence
  Description of Artificial Sequence: Synthetic polypeptide
CSCFRDVCC

SEQ ID NO: 2450 - protein, 9 aa, Artificial Sequence
  Description of Artificial Sequence: Synthetic polypeptide
CRDVVSVIC

SEQ ID NO: 2451 - protein, 6 aa, Artificial Sequence
  Description of Artificial Sequence: Synthetic polypeptide
MARSGL

SEQ ID NO: 2452 - protein, 6 aa, Artificial Sequence
  Description of Artificial Sequence: Synthetic polypeptide
MARAKE

SEQ ID NO: 2453 - protein, 6 aa, Artificial Sequence
  Description of Artificial Sequence: Synthetic polypeptide
MSRTMS

SEQ ID NO: 2454 - protein, 6 aa, Artificial Sequence
  Description of Artificial Sequence: Synthetic polypeptide
KCCYSL

SEQ ID NO: 2455 - protein, 14 aa, Artificial Sequence
  Description of Artificial Sequence: Synthetic polypeptide
MYWGDSHWLQYWYE

SEQ ID NO: 2456 - protein, 7 aa, Artificial Sequence
  Description of Artificial Sequence: Synthetic polypeptide
MQLPLAT

SEQ ID NO: 2457 - protein, 4 aa, Artificial Sequence
  Description of Artificial Sequence: Synthetic polypeptide
EWLS

SEQ ID NO: 2458 - protein, 4 aa, Artificial Sequence
  Description of Artificial Sequence: Synthetic polypeptide
SNEW

SEQ ID NO: 2459 - protein, 4 aa, Artificial Sequence
  Description of Artificial Sequence: Synthetic polypeptide
TNYL

SEQ ID NO: 2460 - protein, 12 aa, Artificial Sequence
  Description of Artificial Sequence: Synthetic polypeptide
WDLAWMFRLPVG

SEQ ID NO: 2461 - protein, 13 aa, Artificial Sequence
  Description of Artificial Sequence: Synthetic polypeptide
CTVALPGGYVRVC

SEQ ID NO: 2462 - protein, 13 aa, Artificial Sequence
  Description of Artificial Sequence: Synthetic polypeptide
CVAYCIEHHCWTC

SEQ ID NO: 2463 - protein, 12 aa, Artificial Sequence
  Description of Artificial Sequence: Synthetic polypeptide
CVFAHNYDYLVC

SEQ ID NO: 2464 - protein, 10 aa, Artificial Sequence
  Description of Artificial Sequence: Synthetic polypeptide
CVFTSNYAFC

SEQ ID NO: 2465 - protein, 7 aa, Artificial Sequence
  Description of Artificial Sequence: Synthetic polypeptide
VHSPNKK

SEQ ID NO: 2466 - protein, 7 aa, Artificial Sequence
  Description of Artificial Sequence: Synthetic polypeptide
CRGDGWC

SEQ ID NO: 2467 - protein, 6 aa, Artificial Sequence
  Description of Artificial Sequence: Synthetic polypeptide
  MOD_RES (1)..(1): Xaa can be any naturally occurring amino acid
  MOD_RES (6)..(6): Xaa can be any naturally occurring amino acid
XRGCDX

SEQ ID NO: 2468 - protein, 4 aa, Artificial Sequence
  Description of Artificial Sequence: Synthetic polypeptide
  MOD_RES (2)..(4): Xaa can be any naturally occurring amino acid
PXXX

SEQ ID NO: 2469 - protein, 11 aa, Artificial Sequence
  Description of Artificial Sequence: Synthetic polypeptide
SGKGPRQITAL

SEQ ID NO: 2470 - protein, 14 aa, Artificial Sequence
  Description of Artificial Sequence: Synthetic polypeptide
  MOD_RES (10)..(10): Xaa is Ala or Gln
  MOD_RES (11)..(11): Xaa is Asn or Ala
  MOD_RES (12)..(14): Xaa can be any naturally occurring amino acid
AAAAAAAAAXXXXX

SEQ ID NO: 2471 - protein, 6 aa, Artificial Sequence
  Description of Artificial Sequence: Synthetic polypeptide
VYMSPF

SEQ ID NO: 2472 - protein, 7 aa, Artificial Sequence
  Description of Artificial Sequence: Synthetic polypeptide
ATWLPPR

SEQ ID NO: 2473 - protein, 12 aa, Artificial Sequence
  Description of Artificial Sequence: Synthetic polypeptide
HTMYYHHYQHHL

SEQ ID NO: 2474 - protein, 19 aa, Artificial Sequence
  Description of Artificial Sequence: Synthetic polypeptide
SEVGCRAGPLQWLCEKYFG

SEQ ID NO: 2475 - protein, 18 aa, Artificial Sequence
  Description of Artificial Sequence: Synthetic polypeptide
CGLLPVGRPDRNVWRWLC

SEQ ID NO: 2476 - protein, 15 aa, Artificial Sequence
  Description of Artificial Sequence: Synthetic polypeptide
CKGQCDRFKGLPWEC

SEQ ID NO: 2477 - protein, 5 aa, Artificial Sequence
  Description of Artificial Sequence: Synthetic polypeptide
SGRSA

SEQ ID NO: 2478 - protein, 4 aa, Artificial Sequence
  Description of Artificial Sequence: Synthetic polypeptide
WGFP

SEQ ID NO: 2479 - protein, 17 aa, Artificial Sequence
  Description of Artificial Sequence: Synthetic polypeptide
AEPMPHSLNFSQYLWYT

SEQ ID NO: 2480 - protein, 6 aa, Artificial Sequence
  Description of Artificial Sequence: Synthetic polypeptide
  MOD_RES (4)..(4): Xaa is Trp or Phe
WAYXSP

SEQ ID NO: 2481 - protein, 7 aa, Artificial Sequence
  Description of Artificial Sequence: Synthetic polypeptide
IELLQAR

SEQ ID NO: 2482 - protein, 16 aa, Artificial Sequence
  Description of Artificial Sequence: Synthetic polypeptide
AYTKCSRQWRTCMTTH

SEQ ID NO: 2483 - protein, 15 aa, Artificial Sequence
  Description of Artificial Sequence: Synthetic polypeptide
PQNSKIPGPTFLDPH

SEQ ID NO: 2484 - protein, 15 aa, Artificial Sequence
  Description of Artificial Sequence: Synthetic polypeptide
SMEPALPDWWWKMFK

SEQ ID NO: 2485 - protein, 16 aa, Artificial Sequence
  Description of Artificial Sequence: Synthetic polypeptide
ANTPCGPYTHDCPVKR

SEQ ID NO: 2486 - protein, 12 aa, Artificial Sequence
  Description of Artificial Sequence: Synthetic polypeptide
TACHQHVRMVRP

SEQ ID NO: 2487 - protein, 12 aa, Artificial Sequence
  Description of Artificial Sequence: Synthetic polypeptide
VPWMEPAYQRFL

SEQ ID NO: 2488 - protein, 8 aa, Artificial Sequence
  Description of Artificial Sequence: Synthetic polypeptide
DPRATPGS

SEQ ID NO: 2489 - protein, 12 aa, Artificial Sequence
  Description of Artificial Sequence: Synthetic polypeptide
FRPNRAQDYNTN

SEQ ID NO: 2490 - protein, 9 aa, Artificial Sequence
  Description of Artificial Sequence: Synthetic polypeptide
CTKNSYLMC

SEQ ID NO: 2491 - protein, 11 aa, Artificial Sequence
  Description of Artificial Sequence: Synthetic polypeptide
  MOD_RES (2)..(2): Xaa is Gln or Arg
  MOD_RES (3)..(3): Xaa is Leu or Arg
  MOD_RES (5)..(5): Xaa is Gly or Asn
  MOD_RES (6)..(7): Xaa is any amino acid residue
  MOD_RES (9)..(9): Xaa is Ala or Val
CXXTXXXGXGC

SEQ ID NO: 2492 - protein, 9 aa, Artificial Sequence
  Description of Artificial Sequence: Synthetic polypeptide
CPIEDRPMC

SEQ ID NO: 2493 - protein, 12 aa, Artificial Sequence
  Description of Artificial Sequence: Synthetic polypeptide
HEWSYLAPYPWF

SEQ ID NO: 2494 - protein, 9 aa, Artificial Sequence
  Description of Artificial Sequence: Synthetic polypeptide
MCPKHPLGC

SEQ ID NO: 2495 - protein, 15 aa, Artificial Sequence
  Description of Artificial Sequence: Synthetic polypeptide
RMWPSSTVNLSAGRR

SEQ ID NO: 2496 - protein, 20 aa, Artificial Sequence
  Description of Artificial Sequence: Synthetic polypeptide
SAKTAVSQRVWLPSHRGGEP

SEQ ID NO: 2497 - protein, 20 aa, Artificial Sequence
  Description of Artificial Sequence: Synthetic polypeptide
KSREHVNNSACPSKRITAAL

SEQ ID NO: 2498 - protein, 4 aa, Artificial Sequence
  Description of Artificial Sequence: Synthetic polypeptide
EGFR

SEQ ID NO: 2499 - protein, 6 aa, Artificial Sequence
  Description of Artificial Sequence: Synthetic polypeptide
AGLGVR

SEQ ID NO: 2500 - protein, 15 aa, Artificial Sequence
  Description of Artificial Sequence: Synthetic polypeptide
GTRQGHTMRLGVSDG

SEQ ID NO: 2501 - protein, 15 aa, Artificial Sequence
  Description of Artificial Sequence: Synthetic polypeptide
IAGLATPGWSHWLAL

SEQ ID NO: 2502 - protein, 7 aa, Artificial Sequence
  Description of Artificial Sequence: Synthetic polypeptide
SMSIARL

SEQ ID NO: 2503 - protein, 7 aa, Artificial Sequence
  Description of Artificial Sequence: Synthetic polypeptide
HTFEPGV

SEQ ID NO: 2504 - protein, 15 aa, Artificial Sequence
  Description of Artificial Sequence: Synthetic polypeptide
NTSLKRISNKRIRRK

SEQ ID NO: 2505 - protein, 15 aa, Artificial Sequence
  Description of Artificial Sequence: Synthetic polypeptide
LRIKRKRRKRKKTRK

SEQ ID NO: 2506 - DNA, 21 bp, Adeno-associated virus 2
  misc_feature (3)..(3): n is a, c, t, or g
agnvvmdcaggarscascaac

SEQ ID NO: 2507 - protein, 7 aa, Artificial Sequence
  Description of Artificial Sequence: Synthetic polypeptide
SDSGASN

SEQ ID NO: 2508 - protein, 7 aa, Artificial Sequence
  Description of Artificial Sequence: Synthetic polypeptide
SPSGASN

SEQ ID NO: 2509 - protein, 7 aa, Artificial Sequence
  Description of Artificial Sequence: Synthetic polypeptide
SHSGASN

SEQ ID NO: 2510 - protein, 7 aa, Artificial Sequence
  Description of Artificial Sequence: Synthetic polypeptide
SRSGASN

SEQ ID NO: 2511 - protein, 7 aa, Artificial Sequence
  Description of Artificial Sequence: Synthetic polypeptide
SKSGASN

SEQ ID NO: 2512 - protein, 7 aa, Artificial Sequence
  Description of Artificial Sequence: Synthetic polypeptide
SNSGASN

SEQ ID NO: 2513 - protein, 7 aa, Artificial Sequence
  Description of Artificial Sequence: Synthetic polypeptide
SGSGASN

SEQ ID NO: 2514 - protein, 7 aa, Artificial Sequence
  Description of Artificial Sequence: Synthetic polypeptide
SASGASN

SEQ ID NO: 2515 - protein, 7 aa, Artificial Sequence
  Description of Artificial Sequence: Synthetic polypeptide
SESGTSN

SEQ ID NO: 2516 - protein, 7 aa, Artificial Sequence
  Description of Artificial Sequence: Synthetic polypeptide
STTGGSN

SEQ ID NO: 2517 - protein, 7 aa, Artificial Sequence
  Description of Artificial Sequence: Synthetic polypeptide
SSAGSTN

SEQ ID NO: 2518 - protein, 6 aa, Artificial Sequence
  Description of Artificial Sequence: Synthetic polypeptide
NNDSQA

SEQ ID NO: 2519 - protein, 6 aa, Artificial Sequence
  Description of Artificial Sequence: Synthetic polypeptide
NNRNQA

SEQ ID NO: 2520 - protein, 6 aa, Artificial Sequence
  Description of Artificial Sequence: Synthetic polypeptide
NNNKQA

SEQ ID NO: 2521 - protein, 6 aa, Artificial Sequence
  Description of Artificial Sequence: Synthetic polypeptide
NAKRQA

SEQ ID NO: 2522 - protein, 6 aa, Artificial Sequence
  Description of Artificial Sequence: Synthetic polypeptide
NDEHQA

SEQ ID NO: 2523 - protein, 6 aa, Artificial Sequence
  Description of Artificial Sequence: Synthetic polypeptide
NTSQKA

SEQ ID NO: 2524 - protein, 25 aa, Artificial Sequence
  Description of Artificial Sequence: Synthetic polypeptide
YYLSRTNTPSGTDTQSRLVFSQAGA

SEQ ID NO: 2525 - protein, 25 aa, Artificial Sequence
  Description of Artificial Sequence: Synthetic polypeptide
YYLSRTNTDSGTETQSGLDFSQAGA

SEQ ID NO: 2526 - protein, 25 aa, Artificial Sequence
  Description of Artificial Sequence: Synthetic polypeptide
YYLSRTNTESGTPTQSALEFSQAGA

SEQ ID NO: 2527 - protein, 25 aa, Artificial Sequence
  Description of Artificial Sequence: Synthetic polypeptide
YYLSRTNTHSGTHTQSPLHFSQAGA

SEQ ID NO: 2528 - protein, 25 aa, Artificial Sequence
  Description of Artificial Sequence: Synthetic polypeptide
YYLSRTNTSSGTITISHLIFSQAGA

SEQ ID NO: 2529 - protein, 25 aa, Artificial Sequence
  Description of Artificial Sequence: Synthetic polypeptide
YYLSRTNTRSGIMTKSSLMFSQAGA

SEQ ID NO: 2530 - protein, 25 aa, Artificial Sequence
  Description of Artificial Sequence: Synthetic polypeptide
YYLSRTNTKSGRKTLSNLSFSQAGA

SEQ ID NO: 2531 - protein, 25 aa, Artificial Sequence
  Description of Artificial Sequence: Synthetic polypeptide
YYLSRTNDGSGPVTPSKLRFSQRGA

SEQ ID NO: 2532 - protein, 25 aa, Artificial Sequence
  Description of Artificial Sequence: Synthetic polypeptide
YYLSRTNAASGHATHSDLKFSQPGA

SEQ ID NO: 2533 - protein, 25 aa, Artificial Sequence
  Description of Artificial Sequence: Synthetic polypeptide
YYLSRTNGQAGSLTMSELGFSQVGA

SEQ ID NO: 2534 - protein, 25 aa, Artificial Sequence
  Description of Artificial Sequence: Synthetic polypeptide
YYLSRTNSTGGNQTTSQLLFSQLSA

SEQ ID NO: 2535 - protein, 25 aa, Artificial Sequence
  Description of Artificial Sequence: Synthetic polypeptide
YFLSRTNNNTGLNTNSTLNFSQGRA

SEQ ID NO: 2536 - protein, 16 aa, Artificial Sequence
  Description of Artificial Sequence: Synthetic polypeptide
SKTGADNNNSEYSWTG

SEQ ID NO: 2537 - protein, 16 aa, Artificial Sequence
  Description of Artificial Sequence: Synthetic polypeptide
SKTDADNNNSEYSWTG

SEQ ID NO: 2538 - protein, 16 aa, Artificial Sequence
  Description of Artificial Sequence: Synthetic polypeptide
SKTEADNNNSEYSWTG

SEQ ID NO: 2539 - protein, 16 aa, Artificial Sequence
  Description of Artificial Sequence: Synthetic polypeptide
SKTPADNNNSEYSWTG

SEQ ID NO: 2540 - protein, 16 aa, Artificial Sequence
  Description of Artificial Sequence: Synthetic polypeptide
SKTHADNNNSEYSWTG

SEQ ID NO: 2541 - protein, 16 aa, Artificial Sequence
  Description of Artificial Sequence: Synthetic polypeptide
SKTQADNNNSEYSWTG

SEQ ID NO: 2542 - protein, 16 aa, Artificial Sequence
  Description of Artificial Sequence: Synthetic polypeptide
SKTIADNNNSEYSWTG

SEQ ID NO: 2543 - protein, 16 aa, Artificial Sequence
  Description of Artificial Sequence: Synthetic polypeptide
SKTMADNNNSEYSWTG

SEQ ID NO: 2544 - protein, 16 aa, Artificial Sequence
  Description of Artificial Sequence: Synthetic polypeptide
SKTRADNNNSEYSWTG

SEQ ID NO: 2545 - protein, 16 aa, Artificial Sequence
  Description of Artificial Sequence: Synthetic polypeptide
SKTNADNNNSEYSWTG

SEQ ID NO: 2546 - protein, 16 aa, Artificial Sequence
  Description of Artificial Sequence: Synthetic polypeptide
SKTVGRNNNSEYSWTG

SEQ ID NO: 2547 - protein, 16 aa, Artificial Sequence
  Description of Artificial Sequence: Synthetic polypeptide
SKTADRNNNSEYSWTG

SEQ ID NO: 2548 - protein, 16 aa, Artificial Sequence
  Description of Artificial Sequence: Synthetic polypeptide
SKKLSQNNNSKYSWQG

SEQ ID NO: 2549 - protein, 16 aa, Artificial Sequence
  Description of Artificial Sequence: Synthetic polypeptide
SKPTTGNNNSDYSWPG

SEQ ID NO: 2550 - protein, 16 aa, Artificial Sequence
  Description of Artificial Sequence: Synthetic polypeptide
STQKNENNNSNYSWPG

SEQ ID NO: 2551 - protein, 8 aa, Artificial Sequence
  Description of Artificial Sequence: Synthetic polypeptide
HKDDEGKF

SEQ ID NO: 2552 - protein, 8 aa, Artificial Sequence
  Description of Artificial Sequence: Synthetic polypeptide
HKDDNRKF

SEQ ID NO: 2553 - protein, 8 aa, Artificial Sequence
  Description of Artificial Sequence: Synthetic polypeptide
HKDDTNKF

SEQ ID NO: 2554 - protein, 8 aa, Artificial Sequence
  Description of Artificial Sequence: Synthetic polypeptide
HEDSDKNF

SEQ ID NO: 2555 - protein, 8 aa, Artificial Sequence
  Description of Artificial Sequence: Synthetic polypeptide
HRDGADSF

SEQ ID NO: 2556 - protein, 8 aa, Artificial Sequence
  Description of Artificial Sequence: Synthetic polypeptide
HGDNKSRF

SEQ ID NO: 2557 - protein, 14 aa, Artificial Sequence
  Description of Artificial Sequence: Synthetic polypeptide
KQGSEKTNVDFEEV

SEQ ID NO: 2558 - protein, 14 aa, Artificial Sequence
  Description of Artificial Sequence: Synthetic polypeptide
KQGSEKTNVDSEEV

SEQ ID NO: 2559 - protein, 14 aa, Artificial Sequence
  Description of Artificial Sequence: Synthetic polypeptide
KQGSEKTNVDVEEV

SEQ ID NO: 2560 - protein, 14 aa, Artificial Sequence
  Description of Artificial Sequence: Synthetic polypeptide
KQGSDKTNVDDAGV

SEQ ID NO: 2561 - protein, 14 aa, Artificial Sequence
  Description of Artificial Sequence: Synthetic polypeptide
KQGSSKTNVDPREV

SEQ ID NO: 2562 - protein, 14 aa, Artificial Sequence
  Description of Artificial Sequence: Synthetic polypeptide
KQGSRKTNVDHKQV

SEQ ID NO: 2563 - protein, 14 aa, Artificial Sequence
  Description of Artificial Sequence: Synthetic polypeptide
KQGSKGGNVDTNRV

SEQ ID NO: 2564 - protein, 14 aa, Artificial Sequence
  Description of Artificial Sequence: Synthetic polypeptide
KQGSGEANVDNGDV

SEQ ID NO: 2565 - protein, 14 aa, Artificial Sequence
  Description of Artificial Sequence: Synthetic polypeptide
KQDAAADNIDYDHV

SEQ ID NO: 2566 - protein, 14 aa, Artificial Sequence
  Description of Artificial Sequence: Synthetic polypeptide
KQSGTRSNAAASSV

SEQ ID NO: 2567 - protein, 14 aa, Artificial Sequence
  Description of Artificial Sequence: Synthetic polypeptide
KENTNTNDTELTNV

SEQ ID NO: 2568 - protein, 14 aa, Artificial Sequence
  Description of Artificial Sequence: Synthetic polypeptide
QRGNNVAATADVNT

SEQ ID NO: 2569 - protein, 14 aa, Artificial Sequence
  Description of Artificial Sequence: Synthetic polypeptide
QRGNNEAATADVNT

SEQ ID NO: 2570 - protein, 14 aa, Artificial Sequence
  Description of Artificial Sequence: Synthetic polypeptide
QRGNNPAATADVNT

SEQ ID NO: 2571 - protein, 14 aa, Artificial Sequence
  Description of Artificial Sequence: Synthetic polypeptide
QRGNNHAATADVNT

SEQ ID NO: 2572 - protein, 14 aa, Artificial Sequence
  Description of Artificial Sequence: Synthetic polypeptide
QEENNIAATPGVNT

SEQ ID NO: 2573 - protein, 14 aa, Artificial Sequence
  Description of Artificial Sequence: Synthetic polypeptide
QPPNNMAATHEVNT

SEQ ID NO: 2574 - protein, 14 aa, Artificial Sequence
  Description of Artificial Sequence: Synthetic polypeptide
QHHNNSAATTIVNT

SEQ ID NO: 2575 - protein, 14 aa, Artificial Sequence
  Description of Artificial Sequence: Synthetic polypeptide
QTTNNRAAFNMVET

SEQ ID NO: 2576 - protein, 14 aa, Artificial Sequence
  Description of Artificial Sequence: Synthetic polypeptide
QKKNNNAASKKVAT

SEQ ID NO: 2577 - protein, 14 aa, Artificial Sequence
  Description of Artificial Sequence: Synthetic polypeptide
QGGNNKAADDAVKT

SEQ ID NO: 2578 - protein, 14 aa, Artificial Sequence
  Description of Artificial Sequence: Synthetic polypeptide
QAAKGGAADDAVKT

SEQ ID NO: 2579 - protein, 14 aa, Artificial Sequence
  Description of Artificial Sequence: Synthetic polypeptide
QDDRAAAANESVDT

SEQ ID NO: 2580 - protein, 14 aa, Artificial Sequence
  Description of Artificial Sequence: Synthetic polypeptide
QQQHDDAAYQRVHT

SEQ ID NO: 2581 - protein, 14 aa, Artificial Sequence
  Description of Artificial Sequence: Synthetic polypeptide
QSSSSLAAVSTVQT

SEQ ID NO: 2582 - protein, 14 aa, Artificial Sequence
  Description of Artificial Sequence: Synthetic polypeptide
QNNQTTAAIRNVTT

SEQ ID NO: 2583 - protein, 12 aa, Artificial Sequence
  Description of Artificial Sequence: Synthetic polypeptide
NYNKKSDNVDFT

SEQ ID NO: 2584 - protein, 12 aa, Artificial Sequence
  Description of Artificial Sequence: Synthetic polypeptide
NYNKKSENVDFT

SEQ ID NO: 2585 - protein, 12 aa, Artificial Sequence
  Description of Artificial Sequence: Synthetic polypeptide
NYNKKSLNVDFT

SEQ ID NO: 2586 - protein, 12 aa, Artificial Sequence
  Description of Artificial Sequence: Synthetic polypeptide
NYNKKSPNVDFT

SEQ ID NO: 2587 - protein, 12 aa, Artificial Sequence
  Description of Artificial Sequence: Synthetic polypeptide
NYSKKSHCVDFT

SEQ ID NO: 2588 - protein, 11 aa, Artificial Sequence
  Description of Artificial Sequence: Synthetic polypeptide
NYRKTIYVDFT

SEQ ID NO: 2589 - protein, 11 aa, Artificial Sequence
  Description of Artificial Sequence: Synthetic polypeptide
NYKEKKDVHFT

SEQ ID NO: 2590 - protein, 11 aa, Artificial Sequence
  Description of Artificial Sequence: Synthetic polypeptide
NYGHRAIVQFT

SEQ ID NO: 2591 - protein, 11 aa, Artificial Sequence
  Description of Artificial Sequence: Synthetic polypeptide
NYANHQFVVCT

SEQ ID NO: 2592 - protein, 12 aa, Artificial Sequence
  Description of Artificial Sequence: Synthetic polypeptide
NYDDDPTGVLLT

SEQ ID NO: 2593 - protein, 11 aa, Artificial Sequence
  Description of Artificial Sequence: Synthetic polypeptide
NYDDPTGVLLT

SEQ ID NO: 2594 - protein, 11 aa, Artificial Sequence
  Description of Artificial Sequence: Synthetic polypeptide
NFEQQNSVEWT

SEQ ID NO: 2595 - protein, 7 aa, Artificial Sequence
  Description of Artificial Sequence: Synthetic polypeptide
SQSGASN

SEQ ID NO: 2596 - protein, 6 aa, Artificial Sequence
  Description of Artificial Sequence: Synthetic polypeptide
NNGSQA

SEQ ID NO: 2597 - protein, 25 aa, Artificial Sequence
  Description of Artificial Sequence: Synthetic polypeptide
YYLSRTNTPSGTTTWSRLQFSQAGA

SEQ ID NO: 2598 - protein, 16 aa, Artificial Sequence
  Description of Artificial Sequence: Synthetic polypeptide
SKTSADNNNSEYSWTG

SEQ ID NO: 2599 - protein, 8 aa, Artificial Sequence
  Description of Artificial Sequence: Synthetic polypeptide
HKDDEEKF

SEQ ID NO: 2600 - protein, 14 aa, Artificial Sequence
  Description of Artificial Sequence: Synthetic polypeptide
KQGSEKTNVDIEEV

SEQ ID NO: 2601 - protein, 14 aa, Artificial Sequence
  Description of Artificial Sequence: Synthetic polypeptide
QRGNNQAATADVNT

SEQ ID NO: 2602 - protein, 12 aa, Artificial Sequence
  Description of Artificial Sequence: Synthetic polypeptide
NYNKKSVNVDFT

SEQ ID NO: 2603 - protein, 42 aa, Artificial Sequence
  Description of Artificial Sequence: Synthetic polypeptide
SQSGASNYNTPSGTTTQSRLQFSTSADNNNSEYSWTGATKYH

SEQ ID NO: 2604 - protein, 42 aa, Artificial Sequence
  Description of Artificial Sequence: Synthetic polypeptide
SASGASNFNSEGGSLTQSSLGFSTDGENNNSDFSWTGATKYH

SEQ ID NO: 2605 - protein, 42 aa, Artificial Sequence
  Description of Artificial Sequence: Synthetic polypeptide
SQSGASNYNTPSGTTTQSRLQFSTDGENNNSDFSWTGATKYH

SEQ ID NO: 2606 - protein, 42 aa, Artificial Sequence
  Description of Artificial Sequence: Synthetic polypeptide
SASGASNYNTPSGTTTQSRLQFSTSADNNNSEFSWPGATTYH

SEQ ID NO: 2607 - protein, 42 aa, Artificial Sequence
  Description of Artificial Sequence: Synthetic polypeptide
SQSGASNFNSEGGSLTQSSLGFSTDGENNNSDFSWTGATKYH

SEQ ID NO: 2608 - protein, 42 aa, Artificial Sequence
  Description of Artificial Sequence: Synthetic polypeptide
SASGASNYNTPSGSLTQSSLGFSTDGENNNSDFSWTGATKYH

SEQ ID NO: 2609 - protein, 42 aa, Artificial Sequence
  Description of Artificial Sequence: Synthetic polypeptide
SQSGASNYNTPSGTTTQSRLQFSTSADNNNSDFSWTGATKYH

SEQ ID NO: 2610 - protein, 42 aa, Artificial Sequence
  Description of Artificial Sequence: Synthetic polypeptide
SGAGASNFNSEGGSLTQSSLGFSTDGENNNSDFSWTGATKYH

SEQ ID NO: 2611 - protein, 7 aa, Artificial Sequence
  Description of Artificial Sequence: Synthetic polypeptide
SGAGASN

SEQ ID NO: 2612 - protein, 15 aa, Artificial Sequence
  Description of Artificial Sequence: Synthetic polypeptide
NSEGGSLTQSSLGFS

SEQ ID NO: 2613 - protein, 11 aa, Artificial Sequence
  Description of Artificial Sequence: Synthetic polypeptide
TDGENNNSDFS

SEQ ID NO: 2614 - protein, 10 aa, Artificial Sequence
  Description of Artificial Sequence: Synthetic polypeptide
SEFSWPGATT

SEQ ID NO: 2615 - protein, 13 aa, Artificial Sequence
  Description of Artificial Sequence: Synthetic polypeptide
TSADNNNSDFSWT

SEQ ID NO: 2616 - protein, 8 aa, Artificial Sequence
  Description of Artificial Sequence: Synthetic polypeptide
SQSGASNY

SEQ ID NO: 2617 - protein, 15 aa, Artificial Sequence
  Description of Artificial Sequence: Synthetic polypeptide
NTPSGTTTQSRLQFS

SEQ ID NO: 2618 - protein, 19 aa, Artificial Sequence
  Description of Artificial Sequence: Synthetic polypeptide
TSADNNNSEYSWTGATKYH

SEQ ID NO: 2619 - protein, 8 aa, Artificial Sequence
  Description of Artificial Sequence: Synthetic polypeptide
SASGASNF

SEQ ID NO: 2620 - protein, 19 aa, Artificial Sequence
  Description of Artificial Sequence: Synthetic polypeptide
TDGENNNSDFSWTGATKYH

SEQ ID NO: 2621 - protein, 8 aa, Artificial Sequence
  Description of Artificial Sequence: Synthetic polypeptide
SASGASNY

SEQ ID NO: 2622 - protein, 19 aa, Artificial Sequence
  Description of Artificial Sequence: Synthetic polypeptide
TSADNNNSEFSWPGATTYH

SEQ ID NO: 2623 - protein, 15 aa, Artificial Sequence
  Description of Artificial Sequence: Synthetic polypeptide
NTPSGSLTQSSLGFS

SEQ ID NO: 2624 - protein, 19 aa, Artificial Sequence
  Description of Artificial Sequence: Synthetic polypeptide
TSADNNNSDFSWTGATKYH

SEQ ID NO: 2625 - protein, 8 aa, Artificial Sequence
  Description of Artificial Sequence: Synthetic polypeptide
SGAGASNF

SEQ ID NO: 2626 - DNA, 48 bp, Artificial Sequence
  Description of Artificial Sequence: Synthetic oligonucleotide
  misc_feature (20)..(20): n is a, c, t, or g
  misc_feature (35)..(35): n is a, c, t, or g
ctccagvvsvvsmrsrvcvnsgcagctdhcvvsrnsgtcvmsacacaa

SEQ ID NO: 2627 - DNA, 48 bp, Artificial Sequence
  Description of Artificial Sequence: Synthetic oligonucleotide
ctccagagaggcaacagacaagcagctaccgcagatgtcaacacacaa

SEQ ID NO: 2628 - protein, 7 aa, Artificial Sequence
  Description of Artificial Sequence: Synthetic polypeptide
SAAGASN

SEQ ID NO: 2629 - protein, 24 aa, Artificial Sequence
  Description of Artificial Sequence: Synthetic polypeptide
YFLSRTNTESGSTTQSTLRFSQAG

SEQ ID NO: 2630 - protein, 13 aa, Artificial Sequence
  Description of Artificial Sequence: Synthetic polypeptide
SKTSADNNNSDFS

SEQ ID NO: 2631 - protein, 14 aa, Artificial Sequence
  Description of Artificial Sequence: Synthetic polypeptide
KQGSEKTDVDIDKV

SEQ ID NO: 2632 - protein, 7 aa, Artificial Sequence
  Description of Artificial Sequence: Synthetic polypeptide
STAGASN

SEQ ID NO: 2633 - protein, 24 aa, Artificial Sequence
  Description of Artificial Sequence: Synthetic polypeptide
YFLSRTNTTSGIETQSTLRFSQAG

SEQ ID NO: 2634 - protein, 13 aa, Artificial Sequence
  Description of Artificial Sequence: Synthetic polypeptide
SKTDGENNNSDFS

SEQ ID NO: 2635 - protein, 14 aa, Artificial Sequence
  Description of Artificial Sequence: Synthetic polypeptide
KQGAAADDVEIDGV

SEQ ID NO: 2636 - protein, 7 aa, Artificial Sequence
  Description of Artificial Sequence: Synthetic polypeptide
SEAGASN

SEQ ID NO: 2637 - protein, 24 aa, Artificial Sequence
  Description of Artificial Sequence: Synthetic polypeptide
YYLSRTNTPSGTTTQSRLQFSQAG

SEQ ID NO: 2638 - protein, 13 aa, Artificial Sequence
  Description of Artificial Sequence: Synthetic polypeptide
SKTSADNNNSEYS

SEQ ID NO: 2639 - protein, 14 aa, Artificial Sequence
  Description of Artificial Sequence: Synthetic polypeptide
KQGSEKTNVDIEKV

SEQ ID NO: 2640 - protein, 24 aa, Artificial Sequence
  Description of Artificial Sequence: Synthetic polypeptide
YFLSRTNDASGSDTKSTLLFSQAG

SEQ ID NO: 2641 - protein, 13 aa, Artificial Sequence
  Description of Artificial Sequence: Synthetic polypeptide
STTPSENNNSEYS

SEQ ID NO: 2642 - protein, 7 aa, Artificial Sequence
  Description of Artificial Sequence: Synthetic polypeptide
SAAGATN

SEQ ID NO: 2643 - protein, 24 aa, Artificial Sequence
  Description of Artificial Sequence: Synthetic polypeptide
YFLSRTNGEAGSATLSELRFSQAG

SEQ ID NO: 2644 - protein, 8 aa, Artificial Sequence
  Description of Artificial Sequence: Synthetic polypeptide
HGDDADRF

SEQ ID NO: 2645 - protein, 14 aa, Artificial Sequence
  Description of Artificial Sequence: Synthetic polypeptide
KQGAEKSDVEVDRV

SEQ ID NO: 2646 - protein, 14 aa, Artificial Sequence
  Description of Artificial Sequence: Synthetic polypeptide
KQDSGGDNIDIDQV

SEQ ID NO: 2647 - protein, 7 aa, Artificial Sequence
  Description of Artificial Sequence: Synthetic polypeptide
SDAGASN

SEQ ID NO: 2648 - protein, 24 aa, Artificial Sequence
  Description of Artificial Sequence: Synthetic polypeptide
YFLSRTNTEGGHDTQSTLRFSQAG

SEQ ID NO: 2649 - protein, 14 aa, Artificial Sequence
  Description of Artificial Sequence: Synthetic polypeptide
KEDGGGSDVAIDEV

SEQ ID NO: 2650 - protein, 7 aa, Artificial Sequence
  Description of Artificial Sequence: Synthetic polypeptide
SNAGASN

SEQ ID NO: 2651 - protein, 24 aa, Artificial Sequence
  Description of Artificial Sequence: Synthetic polypeptide
YFLSRTNGEAGSATLSELRFSQPG

SEQ ID NO: 2652 - DNA, 21 bp, Artificial Sequence
  Description of Artificial Sequence: Synthetic oligonucleotide
agcvvmdcaggarscascaac

SEQ ID NO: 2653 - DNA, 18 bp, Artificial Sequence
  Description of Artificial Sequence: Synthetic oligonucleotide
aacracrrsmrsmaggca

SEQ ID NO: 2654 - DNA, 24 bp, Artificial Sequence
  Description of Artificial Sequence: Synthetic oligonucleotide
cacrrggacrrcrmsrrsarsttt

SEQ ID NO: 2655 - DNA, 75 bp, Artificial Sequence
  Description of Artificial Sequence: Synthetic oligonucleotide
  misc_feature (35)..(35): a, c, t, or g
tatttcttgagcagaacaaacrvcvvsrscggamncvhsacgmhstcavvscttvdsttttctcagsbcrgsgcg

SEQ ID NO: 2656 - DNA, 48 bp, Artificial Sequence
  Description of Artificial Sequence: Synthetic oligonucleotide
  misc_feature (11)..(11): a, c, t, or g
tcaamammavnsrvcsrsaacaacaacagtrasttctcgtggmmagga

SEQ ID NO: 2657 - DNA, 42 bp, Artificial Sequence
  Description of Artificial Sequence: Synthetic oligonucleotide
  misc_feature (31)..(31): n is a, c, t, or g
aagsaarrcrscrvsrvarvcratrycgmsnhcrvmvrsgtc

SEQ ID NO: 2658 - DNA, 42 bp, Artificial Sequence
  Description of Artificial Sequence: Synthetic oligonucleotide
  misc_feature (17)..(17): a, c, t, or g
  misc_feature (32)..(32): a, c, t, or g
cagvvsvvsmrsrvcvnsgcagctdhcvvsrnsgtcvmsaca

SEQ ID NO: 2659 - DNA, 33 bp, Artificial Sequence
  Description of Artificial Sequence: Synthetic oligonucleotide
aactwcrvsvasmvsvhsddtgtgswstksact

SEQ ID NO: 2660 - DNA, 30 bp, Artificial Sequence
  Description of Artificial Sequence: Synthetic polynucleotide
ttgttgaacatcaccacgtgacgcacgttc

SEQ ID NO: 2661 - DNA, 30 bp, Artificial Sequence
  Description of Artificial Sequence: Synthetic polynucleotide
tccccgtggttctactacataatgtggccg

SEQ ID NO: 2662 - DNA, 30 bp, Artificial Sequence
  Description of Artificial Sequence: Synthetic polynucleotide
ttccacactccgttttggataatgttgaac

SEQ ID NO: 2663 - DNA, 30 bp, Artificial Sequence
  Description of Artificial Sequence: Synthetic polynucleotide
agggacatccccagctccatgctgtggtcg

SEQ ID NO: 2664 - DNA, 30 bp, Artificial Sequence
  Description of Artificial Sequence: Synthetic polynucleotide
agggacaacccctccgactcgccctaatcc

SEQ ID NO: 2665 - DNA, 30 bp, Artificial Sequence
  Description of Artificial Sequence: Synthetic polynucleotide
tcctagtagaagacaccctctcactgcccg

SEQ ID NO: 2666 - DNA, 30 bp, Artificial Sequence
  Description of Artificial Sequence: Synthetic polynucleotide
agtaccatgtacacccactctcccagtgcc

SEQ ID NO: 2667 - DNA, 30 bp, Artificial Sequence
  Description of Artificial Sequence: Synthetic polynucleotide
atatggacgttcatgctgatcaccataccg

SEQ ID NO: 2668 - DNA, 30 bp, Artificial Sequence
  Description of Artificial Sequence: Synthetic polynucleotide
agcaggagctccttggcctcagcgtgcgag

SEQ ID NO: 2669 - DNA, 30 bp, Artificial Sequence
  Description of Artificial Sequence: Synthetic polynucleotide
acaagcagcttcactatgacaaccactgac

SEQ ID NO: 2670 - DNA, 284 bp, Artificial Sequence
  Description of Artificial Sequence: Synthetic polynucleotide
  misc_feature (59)..(59): n is a, c, g, or t
  misc_feature (244)..(244): n is a, c, g, or t
cagcctaggaactggcttcctggaccctgttaccgccagcagagagtctcaamammavnsrvcsrsaacaacaacagtrasttctcctggmmaggagctaccaagtaccacctcaatggcagagactctctggtgaatcccggaccagctatggcaagccacrrggacrrcrmsrrsarsttttttcctcagagcggggttctcatctttgggaagsaarrcrscrvsrvarvcratrycgmsnhcrvmvrsgtcatgattacagacgaagaggagatctggac

SEQ ID NO: 2671 - DNA, 34 bp, Artificial Sequence
  Description of Artificial Sequence: Synthetic polynucleotide
tgggacaatggcggtcgtctctcagagttktkkt

SEQ ID NO: 2672 - DNA, 35 bp, Artificial Sequence
  Description of Artificial Sequence: Synthetic polynucleotide
agaggacckktcctcgatggttcatggtggagtta

SEQ ID NO: 2673 - DNA, 31 bp, Artificial Sequence
  Description of Artificial Sequence: Synthetic polynucleotide
ccacttagggcctggtcgataccgttcggtg

SEQ ID NO: 2674 - DNA, 32 bp, Artificial Sequence
  Description of Artificial Sequence: Synthetic polynucleotide
tctcgccccaagagtagaaacccttcsttyyg

SEQ ID NO: 2675 - protein, 735 aa, Adeno-associated virus 2 [sequence omitted]

SEQ ID NO: 2676 - protein, 736 aa, Adeno-associated virus 9; identical to SEQ ID NO: 123

SEQ ID NO: 2677 - protein, 7 aa, Artificial Sequence
  Description of Artificial Sequence: Synthetic polypeptide
GSTPPPM

SEQ ID NO: 2678 - protein, 7 aa, Artificial Sequence
  Description of Artificial Sequence: Synthetic polypeptide
GETRAPL

SEQ ID NO: 2679 - protein, 6 aa, Artificial Sequence
  Description of Artificial Sequence: Synthetic polypeptide
SPAKFA

SEQ ID NO: 2680 - protein, 6 aa, Artificial Sequence
  Description of Artificial Sequence: Synthetic polypeptide
NKDKLN

SEQ ID NO: 2681 - DNA, 5 bp, Artificial Sequence
  H1 terminator sequence
ttttt

SEQ ID NO: 2682 - DNA, 1165 bp, Artificial Sequence; identical to SEQ ID NO: 1839
  ITR to ITR sequences of VOYPC59

SEQ ID NO: 2683 - DNA, 1267 bp, Artificial Sequence; identical to SEQ ID NO: 1842
  ITR to ITR sequences of VOYPC60

SEQ ID NO: 2684 - DNA, 1267 bp, Artificial Sequence; identical to SEQ ID NO: 1841
  ITR to ITR sequences of VOYPC61

SEQ ID NO: 2685 - DNA, 1369 bp, Artificial Sequence; identical to SEQ ID NO: 1840
  ITR to ITR sequences of VOYPC62

SEQ ID NO: 2686 - DNA, 1676 bp, Artificial Sequence; identical to SEQ ID NO: 1832
  ITR to ITR sequences of VOYPC13

SEQ ID NO: 2687 - DNA, 1778 bp, Artificial Sequence; identical to SEQ ID NO: 1833
  ITR to ITR sequences of VOYPC14

SEQ ID NO: 2688 - DNA, 1778 bp, Artificial Sequence; identical to SEQ ID NO: 1834
  ITR to ITR sequences of VOYPC15

SEQ ID NO: 2689 - DNA, 1880 bp, Artificial Sequence; identical to SEQ ID NO: 1835
  ITR to ITR sequences of VOYPC16

SEQ ID NO: 2690 - DNA, 844 bp, Artificial Sequence
  ITR to ITR sequences of H1 promoter followed by VOYHTmiR-127.579
ctgcgcgctcgctcgctcactgaggccgcccgggcaaagcccgggcgtcgggcgacctttggtcgcccggcctcagtgagcgagcgagcgcgcagagagggagtgtagccatgctctaggaagatcaattcaattcacgcgttgacgtacgaaattcgaacgctgacgtcatcaacccgctccaaggaatcgcgggcccagtgtcactaggcgggaacacccagcgcgcgtgcgccctggcaggaagatggctgtgagggacagggagtggcgccctgcaatatttgcatgtcgctatgtgttctgggaaatcaccataaacgtgaaatgtctttggatttgggaatcttataagttctgtatgagaccacaccggtgaagcaaagaaggggcagagggagcccgtgagctgagtgggccagggactgggagaaggagtgaggaggcagggccggcatgcctctgctgctggccagacctgctagctccatgcttcccgtctgcacctgtcactagtaagcatggagctagcaggtttggccgtgtagtgctacccagcgctggctgcctcctcagcattgcaattcctctcccatctgggcaccagtcagctaccctggtgggaatctgggtagccctcgagatagcggccgcccccgagatctttttatgtacatctagataagtagcatggcgggttaatcattaactacaaggaacccctagtgatggagttggccactccctctctgcgcgctcgctcgctcactgaggccgggcgaccaaaggtcgcccgacgcccgggctttgcccgggcggcctcagtgagcgagcgagcgcgcag

SEQ ID NO: 2691 - DNA, 742 bp, Artificial Sequence
  ITR to ITR sequences of H1 promoter followed by VOYHTmiR-104.016
ctgcgcgctcgctcgctcactgaggccgcccgggcaaagcccgggcgtcgggcgacctttggtcgcccggcctcagtgagcgagcgagcgcgcagagagggagtgtagccatgctctaggaagatcaattcaattcacgcgttgacgtacgaaattcgaacgctgacgtcatcaacccgctccaaggaatcgcgggcccagtgtcactaggcgggaacacccagcgcgcgtgcgccctggcaggaagatggctgtgagggacagggagtggcgccctgcaatatttgcatgtcgctatgtgttctgggaaatcaccataaacgtgaaatgtctttggatttgggaatcttataagttctgtatgagaccacaccggtgtgctgggcggggggcggcgggccctcccgcagaacaccatgcgctcttcggaagcaattcagtctcgttgtgcctgtgacctggtacaacgagactgaattgcttctgaggagcgccttgacagcagccatgggagggccgccccctacctcagtgactcgagatagcggccgcccccgagatctttttatgtacatctagataagtagcatggcgggttaatcattaactacaaggaacccctagtgatggagttggccactccctctctgcgcgctcgctcgctcactgaggccgggcgaccaaaggtcgcccgacgcccgggctttgcccgggcggcctcagtgagcgagcgagcgcgcag

SEQ ID NO: 2692 - DNA, 1584 bp, Artificial Sequence
  ITR to ITR sequences of CMV promoter followed by VOYHTmiR-127.579
ctgcgcgctcgctcgctcactgaggccgcccgggcaaagcccgggcgtcgggcgacctttggtcgcccggcctcagtgagcgagcgagcgcgcagagagggagtgtagccatgctctaggaagatcaattcaattcacgcgtcgacattgattattgactagttattaatagtaatcaattacggggtcattagttcatagcccatatatggagttccgcgttacataacttacggtaaatggcccgcctggctgaccgcccaacgacccccgcccattgacgtcaataatgacgtatgttcccatagtaacgccaatagggactttccattgacgtcaatgggtggagtatttacggtaaactgcccacttggcagtacatcaagtgtatcatatgccaagtacgccccctattgacgtcaatgacggtaaatggcccgcctggcattatgcccagtacatgaccttatgggactttcctacttggcagtacatctacgtattagtcatcgctattaccatgtcgaggccacgttctgcttcactctccccatctcccccccctccccacccccaattttgtatttatttattttttaattattttgtgcagcgatgggggcggggggggggggcgcgcgccaggcggggcggggcggggcgaggggcggggcggggcgaggcggagaggtgcggcggcagccaatcagagcggcgcgctccgaaagtttccttttatggcgaggcggcggcggcggcggccctataaaaagcgaagcgcgcggcgggcgggagcaagcttgaactgaaaaaccagaaagttaactggtaagtttagtctttttgtcttttatttcaggtcccggatccggtggtggtgcaaatcaaagaactgctcctcagtggatgttgcctttacttctaggcctgtacggaagtgttacttctgctctaaaagctgcggaattgtacccgcggccgatccaccggtgaagcaaagaaggggcagagggagcccgtgagctgagtgggccagggactgggagaaggagtgaggaggcagggccggcatgcctctgctgctggccagacctgctagctccatgcttcccgtctgcacctgtcactagtaagcatggagctagcaggtttggccgtgtagtgctacccagcgctggctgcctcctcagcattgcaattcctctcccatctgggcaccagtcagctaccctggtgggaatctgggtagccctcgaggacggggtgaactacgcctgaggatccgatctttttccctctgccaaaaattatggggacatcatgaagccccttgagcatctgacttctggctaataaaggaaatttattttcattgcaatagtgtgttggaattttttgtgtctctcactcggcctaggtagataagtagcatggcgggttaatcattaactacaaggaacccctagtgatggagttggccactccctctctgcgcgctcgctcgctcactgaggccgggcgaccaaaggtcgcccgacgcccgggctttgcccgggcggcctcagtgagcgagcgagcgcgcag

SEQ ID NO: 2693 - DNA, 1482 bp, Artificial Sequence
  ITR to ITR sequences of CMV promoter followed by VOYHTmiR-104.016
ctgcgcgctcgctcgctcactgaggccgcccgggcaaagcccgggcgtcgggcgacctttggtcgcccggcctcagtgagcgagcgagcgcgcagagagggagtgtagccatgctctaggaagatcaattcaattcacgcgtcgacattgattattgactagttattaatagtaatcaattacggggtcattagttcatagcccatatatggagttccgcgttacataacttacggtaaatggcccgcctggctgaccgcccaacgacccccgcccattgacgtcaataatgacgtatgttcccatagtaacgccaatagggactttccattgacgtcaatgggtggagtatttacggtaaactgcccacttggcagtacatcaagtgtatcatatgccaagtacgccccctattgacgtcaatgacggtaaatggcccgcctggcattatgcccagtacatgaccttatgggactttcctacttggcagtacatctacgtattagtcatcgctattaccatgtcgaggccacgttctgcttcactctccccatctcccccccctccccacccccaattttgtatttatttattttttaattattttgtgcagcgatgggggcggggggggggggcgcgcgccaggcggggcggggcggggcgaggggcggggcggggcgaggcggagaggtgcggcggcagccaatcagagcggcgcgctccgaaagtttccttttatggcgaggcggcggcggcggcggccctataaaaagcgaagcgcgcggcgggcgggagcaagcttgaactgaaaaaccagaaagttaactggtaagtttagtctttttgtcttttatttcaggtcccggatccggtggtggtgcaaatcaaagaactgctcctcagtggatgttgcctttacttctaggcctgtacggaagtgttacttctgctctaaaagctgcggaattgtacccgcggccgatccaccggtgtgctgggcggggggcggcgggccctcccgcagaacaccatgcgctcttcggaagcaattcagtctcgttgtgcctgtgacctggtacaacgagactgaattgcttctgaggagcgccttgacagcagccatgggagggccgccccctacctcagtgactcgaggacggggtgaactacgcctgaggatccgatctttttccctctgccaaaaattatggggacatcatgaagccccttgagcatctgacttctggctaataaaggaaatttattttcattgcaatagtgtgttggaattttttgtgtctctcactcggcctaggtagataagtagcatggcgggttaatcattaactacaaggaacccctagtgatggagttggccactccctctctgcgcgctcgctcgctcactgaggccgggcgaccaaaggtcgcccgacgcccgggctttgcccgggcggcctcagtgagcgagcgagcgcgcag
